(19) United States
(12) Patent Application Publication
(10) Pub. No.: US 2003/0143539 A1
(43) Pub. Date: Jul. 31, 2003

(54) Gene expression profiling of primary breast carcinomas using arrays of candidate genes

(76) Inventors: Francois Bertucci, Marseille (FR); Remi Houlgatte, Marseille (FR); Daniel Birnbaum, Marseille (FR); Catherine Nguyen, Marseille (FR); Patrice Viens, Marseille (FR); Vincent Fert, Allauch (FR)

Correspondence Address: Schnader Harrison Segal & Lewis, IP Department, 36th Floor, 1600 Market Street, Philadelphia, PA, 19103, US

(21) Appl. No.: 10/007,926

(22) Filed: Dec. 7, 2001

Related U.S. Application Data
(60) Provisional application No. 60/254,090, filed on Dec. 8, 2000.

(51) Int. Cl. C12Q 1/68; C07H 21/04

(52) U.S. Cl. 435/6; 536/23.1

(57) ABSTRACT

A polynucleotide library useful in the molecular characterization of a carcinoma, the library including a pool of polynucleotide sequences or subsequences thereof wherein the sequences or subsequences are overexpressed in tumor cells, further wherein the sequences or subsequences correspond substantially to any of the polynucleotide sequences set forth in any of SEQ ID NOS: 1-468 or the complement thereof.

### CROSS-REFERENCE TO RELATED APPLICATION

[0001] This application claims the benefit of priority of provisional application Serial No. 60/254,090 filed Dec. 8, 2000.

### FIELD OF THE INVENTION

[0002] This invention relates to polynucleotide analysis and, in particular, to polynucleotide expression profiling of carcinomas using arrays of candidate polynucleotides.

### BACKGROUND

[0003] Pathologists and clinicians in charge of the management of breast cancer patients are facing two major problems, namely the extensive heterogeneity of the disease and the lack of factors—among conventional histological and clinical features—predicting with reliability the evolution of the disease and its sensitivity to cancer therapies. Breast tumors of the same apparent prognostic type vary widely in their responsiveness to therapy and consequent survival of the patient. New prognostic and predictive factors are needed to allow an individualization of therapy for each patient.

[0004] Great hope is currently being placed on molecular studies, which address the problem in a global fashion. Methods such as cytogenetics, comparative genomic hybridization, and whole-genome allelotyping have addressed the issue at the genome level. Currently, the modifications that take place in human tumors at the level of transcription can also be studied in a large, unprecedented scale, using new methods such as cDNA arrays that allow quantitative measurement of the mRNA expression levels of many genes simultaneously. Thus, it would be advantageous to provide a means to assess the capacity of cDNA array testing-in clinical practice to better classify an heterogeneous cancer into tumor subtypes with more homogeneous clinical outcomes, and to identify new potential prognostic factors and therapeutics targets.

### SUMMARY OF THE INVENTION

[0005] The invention relates to a polynucleotide library useful in the molecular characterization of a carcinoma, the library including a pool of polynucleotide sequences or subsequences thereof wherein the sequences or subsequences are either underexpressed or overexpressed in tumor cells, further wherein the sequences or subsequences correspond substantially to any of the polynucleotide sequences set forth in any of SEQ ID NOS: 1-468 or the complement thereof.

### BRIEF DESCRIPTION OF THE DRAWINGS

[0006] FIG. 1 shows an example of differential gene expression between normal breast tissue (NB) and breast tumor samples.

[0007] FIG. 2 is a representation of expression levels of 176 genes in normal breast tissue (NB) and 34 samples of breast carcinoma.

[0008] FIG. 3 is prognostic classification of breast cancer by gene expression profiling.

[0009] FIG. 4 shows the correlation of GATA3 (SEQ ID NO: 78) expression with ER phenotype.

### DETAILED DESCRIPTION OF THE INVENTION

[0010] In the context of this disclosure, a number of terms shall be utilized.

[0011] The term “polynucleotide” refers to a polymer of RNA or DNA that is single-stranded, optionally containing synthetic, non-natural or altered nucleotide bases. A polynucleotide in the form of a polymer of DNA may be comprised of one or more segments of cDNA, genomic DNA or synthetic DNA.

[0012] The term “subsequence” refers to a sequence of nucleic acids that comprises a part of a longer sequence of nucleic acids.

[0013] The term “immobilized on a support” means bound directly or indirectly thereto including attachment by covalent binding, hydrogen bonding, ionic interaction, hydrophobic interaction or otherwise.

[0014] Breast cancer is characterized by an important histoclinical heterogeneity that currently hampers the selection of the most appropriate treatment for each case. This problem could be solved by the identification of new parameters that better predict the natural history of the disease and its sensitivity to treatment. An important object of the present invention relates to a large-scale molecular characterization of breast cancer that could help in prediction, prognosis and cancer treatment.

[0015] An important aspect of the invention relates to the use of cDNA arrays, which allows quantitative study of mRNA expression levels of 188 candidate genes in 34 consecutive primary breast carcinomas in three areas: comparison of tumor samples, correlations of molecular data with conventional histoclinical prognostic features and gene correlations. The experimentation evidenced extensive heterogeneity of breast tumors at the transcriptional level. Hierarchical clustering algorithm identified two molecularly distinct subgroups of tumors characterized by a different clinical outcome after chemotherapy. This outcome could not have been predicted by the commonly used histoclinical parameters. No correlation was found with the age of patients, tumor size, histological type and grade. However, expression of genes was differential in tumors with lymph node metastasis and according to the estrogen receptor status; ERBB2 (SEQ ID No: 119) expression was strongly correlated with the lymph node status (p≦0.0001) and that of GATA3 (SEQ ID No: 78) with the presence of estrogen receptors (p≦0.001). Thus, experimental results identified new ways to group tumors according to outcome and new potential targets of carcinogenesis. They show that the systematic use of cDNA array testing holds great promise to improve the classification of breast cancer in terms of prognosis and chemosensitivity and to provide new potential therapeutic targets.

[0016] DNA arrays consist of large numbers of DNA molecules spotted in a systematic order on a solid support or substrate such as a nylon membrane, glass slide, glass beads, a membrane on a glass support, or a silicon chip. Depending on the size of each DNA spot on the array, DNA arrays can be categorized as microarrays (each DNA spot has a diameter less than 250 microns) and macroarrays (spot diameter is greater than 300 microns). When the solid substrate used is small in size, arrays are also referred to as DNA chips. Depending on the spotting technique used, the number of spots on a glass microarray can range from hundreds to thousands.

[0017] DNA microarrays serve a variety of purposes, including gene expression profiling, de novo gene sequencing, gene mutation analysis, gene mapping and genotyping. cDNA microarrays are printed with distinct cDNA clones isolated from cDNA libraries. Therefore, each spot represents an expressed gene, since it is derived from a distinct mRNA.

[0018] Typically, a method of monitoring gene expression involves (1) providing a pool of sample polynucleotides comprising RNA transcript(s) of one or more target gene(s) or nucleic acids derived from the RNA transcript(s); (2) reacting, such as hybridizing the sample polynucleotide to an array of probes (for example, polynucleotides obtained from a polynucleotide library) (including control probes) and (3) detecting the reacted/hybridized polynucleotides. Detection can also involve calculating/quantifying a relative expression (transcription) level.

[0019] The present invention concerns a polynucleotide library useful in the molecular characterization of a carcinoma, said library comprising a pool of polynucleotide sequences or subsequences thereof wherein said sequences or subsequences are either underexpressed or overexpressed in tumor cells, flrher wherein said sequences or subsequences correspond substantially to any of the polynucleotide sequences set forth in any of SEQ ID Nos: 1-468 in annex or the complement thereof.

[0020] Obviously, sequences having a great degree of homology with the above sequences could also be used to realize the molecular characterization of the invention, namely when those sequences present one or a few punctual mutations when compared with any one of the sequences represented by SEQ ID Nos: 1-468.

[0021] A particular embodiment of the invention relates to a polynucleotide library of sequences or subsequences corresponding substantially to any combination of at least one polynucleotide sequence selected among those included in each one of predefined polynucleotide sequence sets 1 to 188 as defined in table 4.

[0022] A polynucleotide sequence library useful for the realization of the invention can comprise also any sequence comprised between 3′ end and 5′ end of each polynucleotide sequence set as defined in table 4, allowing the complete detection of the implicated gene.

[0023] The invention relates also to a polynucleotide library useful to differentiate a normal cell from a cancer cell wherein the pool of polynucleotide sequences or subsequences correspond substantially to any combination of at least one polynucleotide sequence selected among those included in each one of predefined polynucleotide sequences sets indicated in table 5, useful in differentiating a normal cell from a cancer cell.

[0024] Preferably the polynucleotide library useful to differentiate a normal cell from a cancer cell corresponds substantially to any combination of at least one polynucleotide sequence selected among those included in each one of predefined polynucleotide sequence sets indicated in table 5A, and of at least one polynucleotide sequence selected among those included in each one of predefined polynucleotide sequence sets indicated in table 5B.

[0025] The detection of an overexpression of genes identified with sets of polynucleotide sequences defined in table 5A, together with detection of an underexpression of genes identified with sets of polynucleotide sequences defined in table 5B allows distinction between normal patients and patients suffering from tumor pathology.

[0026] The invention relates also to a polynucleotide library useful to detect a hormone-sensitive tumor cell wherein the pool of polynucleotide sequences or subsequences correspond substantially to any combination of at least one polynucleotide sequence selected among those included in each one of predefined polynucleotide sequence sets defined in table 6.

[0027] Preferably the polynucleotide library useful to detect a hormone-sensitive tumor cell correspond substantially to any combination of at least one polynucleotide sequence selected among those included in each one of predefined polynucleotide sequence sets defined in table 6A together with at least one polynucleotide sequence selected among those included in each one of predefined polynucleotide sequence sets defined in table 6B.

[0028] The detection of an overexpression of genes identified with sets of polynucleotides sequences defined in table 6A, together with detection of an underexpression of genes identified with sets of polynucleotides sequences defined in table 6B allows distinction between patients having a hormone-sensitive tumor and patients having a hormone-resistant tumor.

[0029] The invention also concerns a polynucleotide library useful to differentiate a tumor in which a lymph node has been invaded by a tumor cell from a tumor in which a lymph node has not been invaded by a tumor cell wherein the pool of polynucleotide sequences or subsequences correspond substantially to any combination of at least one polynucleotide sequence selected among those included in each one of predefined polynucleotide sequence sets defined in table 7.

[0030] Preferably, the polynucleotide library useful to differentiate a tumor in which a lymph node has been invaded by a tumor cell from a tumor in which a lymph node has not been invaded by a tumor cell correspond substantially to any combination of at least one polynucleotide sequence selected among those included in each one of predefined polynucleotide sequence sets defined in table 7A together with at least one polynucleotide sequence selected among those included in each one of predefined polynucleotide sequence sets defined in table 7B.

[0031] The detection of an overexpression of genes identified with sets of polynucleotide sequences defined in table 7A, together with detection of an underexpression of genes identified with sets of polynucleotide sequences defined in table 7B allows distinction between patients having a tumor in which a lymph node has been invaded by a tumor cell and patients having a tumor in which a lymph node has not been invaded by a tumor cell.

[0032] The invention concerns also a polynucleotide library useful to differentiate anthracycline-sensitive tumors from anthracycline-insensitive tumors wherein the pool of polynucleotide sequences or subsequences correspond substantially to any combination of at least one polynucleotide sequence selected among those included in each one of predefined polynucleotide sequence sets defined in table 8.

[0033] Preferably, the polynucleotide library useful to differentiate anthracycline-sensitive tumors from anthracycline-insensitive tumors correspond substantially to any combination of at least one polynucleotide sequence selected among those included in each one of predefined polynucleotide sequence sets defined in table 8A together with at least one polynucleotide sequence selected among those included in each one of predefined polynucleotide sequence sets defined in table 8B.

[0034] The detection of an overexpression of genes identified with sets of polynucleotide sequences defined in table 8A, together with detection of an underexpression of genes identified with sets of polynucleotide sequences defined in table 8B allows distinction between patients having an anthracycline-sensitive tumor from patients having an anthracycline-insensitive tumor.

[0035] The invention also concerns a polynucleotide library useful to classify good and poor prognosis primary breast tumors wherein the pool of polynucleotide sequences or subsequences correspond substantially to any combination of at least one polynucleotide sequence selected among those included in each one of predefined polynucleotide sequence sets defined in table 9.

[0036] Preferably, the polynucleotide library useful to classify good and poor prognosis primary breast tumors correspond substantially to any combination of at least one polynucleotide sequence selected among those included in each one of predefined polynucleotide sequence sets defined in table 9A together with at least one polynucleotide sequence selected among those included in each one of predefined polynucleotide sequence sets defined in table 9B.

[0037] The detection of an overexpression of genes identified with sets of polynucleotide sequences defined in table 9A, together with detection of an underexpression of genes identified with sets of polynucleotide sequences defined in table 9B allows to classify patients having good or poor prognosis primary breast tumors.

[0038] In a preferred embodiment, the tumor cell presenting underexpressed or overexpressed sequences from the polynucleotide library of the invention are breast tumor cells.

[0039] In a particular embodiment the polynucleotides of the polynucleotide library of the present invention are immobilized on a solid support in order to form a polynucleotide array, and said solid support is selected from the group consisting of a nylon membrane, nitrocellulose membrane, glass slide, glass beads, membranes on glass support or a silicon chip.

[0040] Another object of the present invention concerns a polynucleotide array useful for prognosis or diagnosis of a tumor bearing at least one immobilized polynucleotide library set as previously defined.

[0041] The invention also concerns a polynucleotide array useful to differentiate a normal cell from a cancer cell bearing any combination of at least one polynucleotide sequence selected among those included in each one of predefined polynucleotide sequence sets indicated in table 5, useful in differentiating a normal cell from a cancer cell.

[0042] Preferably the polynucleotide array useful to differentiate a normal cell from a cancer cell bears any combination of at least one polynucleotide sequence selected among those included in each one of predefined polynucleotide sequence sets indicated in table 5A, and of at least one polynucleotide sequence selected among those included in each one of predefined polynucleotide sequence sets indicated in table 5B.

[0043] The invention relates also to a polynucleotide array useful to detect a hormone-sensitive tumor cell bearing any combination of at least one polynucleotide sequence selected among those included in each one of predefined polynucleotide sequence sets defined in table 6.

[0044] Preferably the polynucleotide array useful to detect a hormone-sensitive tumor cell bears any combination of at least one polynucleotide sequence selected among those included in each one of predefined polynucleotide sequence sets defined in table 6A together with at least one polynucleotide sequence selected among those included in each one of predefined polynucleotide sequence sets defined in table 6B.

[0045] The invention concerns also a polynucleotide array useful to differentiate a tumor in which a lymph node has been invaded by a tumor cell from a tumor in which a lymph node has not been invaded by a tumor cell bearing any combination of at least one polynucleotide sequence selected among those included in each one of predefined polynucleotide sequence sets defined in table 7.

[0046] Preferably, the polynucleotide array useful to differentiate a tumor in which a lymph node has been invaded by a tumor cell from a tumor in which a lymph node has been invaded by a tumor cell bears any combination of at least one polynucleotide sequence selected among those included in each one of predefined polynucleotide sequence sets defined in table 7A together with at least one polynucleotide sequence selected among those included in each one of predefined polynucleotide sequence sets defined in table 7B.

[0047] The invention also concerns a polynucleotide array useful to differentiate anthracycline-sensitive tumors from anthracycline-insensitive tumors bearing any combination of at least one polynucleotide sequence selected among those included in each one of predefined polynucleotide sequence sets defined in table 8.

[0048] Preferably, the polynucleotide array useful to differentiate anthracycline-sensitive tumors from anthracycline-insensitive tumors bears any combination of at least one polynucleotide sequence selected among those included in each one of predefined polynucleotide sequence sets defined in table 8A together with at least one polynucleotide sequence selected among those included in each one of predefined polynucleotide sequence sets defined in table 8B.

[0049] The invention concerns also a polynucleotide array useful to classify good and poor prognosis primary breast tumors bearing any combination of at least one polynucleotide sequence selected among those included in each one of predefined polynucleotide sequence set defined in table 9.

[0050] Preferably, the polynucleotide array useful to classify good and poor prognosis primary breast tumors bears any combination of at least one polynucleotide sequence selected among those included in each one of predefined polynucleotide sequence sets defined in table 9A together with at least one polynucleotide sequence selected among those included in each one of predefined polynucleotide sequence sets defined in table 9B.

[0051] The present invention also concerns a method for detecting differentially expressed polynucleotide sequences that are correlated with a cancer, said method comprising:

[0052] obtaining a polynucleotide sample from a patient;

[0053] reacting the polynucleotide sample obtained in step (a) with a probe immobilized on a solid support wherein said probe comprises any of the polynucleotide sequences of the libraries previously defined or an expression product encoded by any of the polynucleotide sequences of the libraries previously defined; and

[0054] detecting the reaction product of step (b).

[0055] Preferably, the polynucleotide sample obtained at step (a) is labeled before its reaction at step (b) with the probe immobilized on a solid support.

[0056] The label of the polynucleotide sample is selected from the group consisting of radioactive, colorimetric, enzymatic, molecular amplification, bioluminescent or fluorescent labels.

[0057] In a particular embodiment the reaction product of step (c) is quantified by further comparison of said reaction product to a control sample.

[0058] In a first embodiment, the polynucleotide sample isolated from the patient and obtained at step (a) is either RNA or mRNA.

[0059] In another embodiment the polynucleotide sample isolated from the patient is cDNA is obtained by reverse transcription of the mRNA.

[0060] Preferably the reaction step (b) of the method for detecting differentially expressed polynucleotide sequences comprises a hybridization of the sample RNA issued from patient with the probe.

[0061] Preferably the sample RNA is labeled before hybridization with the probe and the label is selected from the group consisting of radioactive, calorimetric, enzymatic, molecular amplification, bioluminescent or fluorescent labels.

[0062] This method for detecting differentially expressed polynucleotide sequences is particularly useful for detecting, diagnosing, staging, monitoring, predicting, preventing or treating conditions associated with cancer, and particularly breast cancer.

[0063] The method for detecting differentially expressed polynucleotide sequences is also particularly useful when the product encoded by any of the polynucleotide sequence or subsequence set is involved in a receptor-ligand reaction on which detection is based.

[0064] The present invention is also related to a method for screening an anti-tumor agent comprising the above-depicted method for detecting differentially expressed polynucleotide sequences wherein the sample has been treated with the anti-tumor agent to be screened.

[0065] In a particular embodiment the method for screening an anti-tumor agent comprises detecting polynucleotide sequences reacting with at least one library of polynucleotides or polynucleotide sequence set as previously defined or of products encoded by said library in a sample obtained from a patient.

[0066] Tumor Samples and RNA Extraction

[0067] To avoid any bias of selection as to the type and size of the tumors, the RNAs to be tested were prepared from unselected samples. Samples of primary invasive breast carcinomas were collected from 34 patients undergoing surgery at the Institute Paoli-Calmette. After surgical resection, the tumors were macrodissected: a section was taken for the pathologist′ s diagnosis and an adjacent piece was quickly frozen in liquid nitrogen for molecular analyses. The median age of patients at the time of diagnosis was 55 years (range 39, 83) and most of them were post-menopausal. Tumors were classified according to the WHO histological typing of breast tumors in: 29 ductal carcinomas, 2 lobular carcinomas, 1 mixed ductal and lobular carcinoma, and 2 medullar carcinomas. They had various sizes, inferior or equal to 20 mm (n 13), between 20 and 50 mm (n=18) or superior to 50 mm (n=3), axillary′ s lymph node status (negative: 19 tumors, positive: 15 tumors), SBR grading (I: 3 tumors, II: 20 tumors, III: 10 tumors, not evaluable: 1 tumor), and estrogen receptor status (ER) evaluated by immunohistochemical assay (23 ER-positive, 11 ER-negative). ER positivity cutoff value was 10%. Adjuvant treatment with radiotherapy and when necessary multi-agent anthracycline-based chemotherapy (n=16) was given to patients according to local practice.

[0068] Total RNA was extracted from tumor samples by standard methods (43). Total RNA from normal breast tissue was obtained from Clontech (Palo Alto, Calif.): RNA was isolated from 8 tissue specimens from Caucasian females, age range 23-47. RNA integrity was controlled by denaturing formaldehyde agarose gel electrophoresis and Northern blots using a 28S-specific oligonucleotide.

[0069] cDNA Arrays Preparation

[0070] Gene expression was analyzed by hybridization of arrays with radioactive probes. The arrays contained PCR products of 5 control clones, and 180 IMAGE human cDNA clones selected with practical criteria (3′ sequence of mRNA, same cloning vector, host bacteria and insert size). This represented 176 genes (4 genes were represented by 2 different clones): 121 with proven or putative implication in cancer and 55 implicated in immune reactions (the list is available on the website: http:/tagc.univ-mrs.fr/pub/Cancer/). Their identity was verified by 5′ tag-sequencing of plasmid DNA and comparison with sequences in the EST (dbEST) and nucleotide (GenBank) databases at the NCBI. Identity was confirmed for all but 14 clones without significant gene similarity, which were referenced by their GenBank accession number. The control clones were: Arabidopsis thaliana cytochrome c 554 gene (used for hybridization signal normalization), 3 poly(A) sequences of different sizes and the vector pT 7T 3D (negative controls).

[0071] PCR amplification, purification and robotical spotting of PCR products onto Hybond-N+ membranes (Amersham) were done according to described protocols (4). All PCR products were spotted in duplicate. For normalization purpose, the c 554 gene was spotted 96-fold scattered over the whole membrane.

[0072] cDNA Array Hybridizations

[0073] Hybridizations were done successively with a vector oligonucleotide (to precisely determine the amount of target DNA accessible to hybridization in each spot), then after stripping of vector probe, with complex probes made from the RNAs (4). Each complex probe was hybridized to a distinct filter. Probes were prepared from total RNA with an excess of oligo(dT 25) to saturate the poly(A) tails of the messengers, and to insure that the reverse transcribed product did not contain long poly(T) sequences. A precise amount of c 554 mRNA was added to the total RNA before labeling to allow normalization of the data.

[0074] Five ng of total RNA (˜100 ng of mRNA) from tissue samples were used for each labeling. Probe preparation and hybridization of the membranes were done according to known procedures (http:/tagc.univ-mrs.fr/pub/Cancer/). Hybridization was done in excess of target (15 ng of DNA in each spot) and binding of cDNAs to the targets was linear and proportional to the quantity of cDNA in the probe.

[0075] Detection and Quantification of cDNA Array Hybridization Signals

[0076] Quantitative data were obtained using an imaging plate device. Hybridization signal detection with a FUJI BAS 1500 machine and quantification with the HDG Analyzer software (Genomic Solutions, Ann Arbor, Mich.) were done as previously described (http:/tagc.univ-mrs.fr/pub/Cancer/). Quantification was done by integrating all spot pixel intensities and substracting a spot background value determined in the neighboring area. Spots were located with a LaPlacian transformation. Spot background level was the median intensity of all the pixels present in a small window centered on the spot and which were not part of any spot (44). Quantified data were normalized in three steps and expressed as absolute gene expression levels (i.e. in percentage of abundance of individual mRNA with respect to mRNA within the sample), as described (4).

[0077] Array Data Analysis

[0078] Before analysis of the results, the reproducibility of the experiments was verified by comparing duplicate spots, or one hybridization with the same probe on two independent arrays, or two independent hybridizations with probes prepared from the same RNA. In every case, the results showed good reproducibility with respective correlation coefficients of 0.95, 0.98 and 0.98 (data not shown). Moreover, genes represented by two different clones on the array, such as CDK 4 (SEQ ID No: 288) or ETV 5 (SEQ ID No: 300), displayed similar expression profiles for the two clones in all samples. This reproducibility was sufficient to consider a 2-fold expression difference as significantly differential.

[0079] For graphical representation, data were displayed as absolute expression levels (FIG. 2a). For better visualization of clustering, results were log-transformed and displayed as relative values median-centered in each row and in each column (FIG. 2b). Hierarchical clustering was applied to the tissue samples and the genes using the Cluster program developed by Eisen (45) (average linkage clustering using Pearson correlation as similarity metric). Results in FIGS. 2 and 3 were displayed with the TreeView program (45).

[0080] Subsequent analysis was done using Excel software (Microsoft) and statistical analyses with the SPSS software. Metastasis-free survival and overall survival were measured from diagnosis until the first metastatic relapse or death respectively. They were estimated with the Kaplan-Meier method and compared between groups with the Log-Rank test. Correlations of gene pairs based on expression profiles were measured with the correlation coefficient r. The search for genes with expression levels correlated with tumor parameters was done in several successive steps.

[0081] First, genes were detected by comparing their median expression level in the two subgroups of tumors discordant according to the parameter of interest. The median values rather than the mean values were used because of the high variability of the expression levels for many genes, resulting in a standard deviation of expression level similar or superior to the mean value and making comparisons with means impossible. Second, these detected genes were inspected visually on graphics, and finally, an appropriate statistical analysis was applied to those that were convincing to validate the correlation. Comparison of GATA3 (SEQ ID No: 78) expression between ER-positive tumors and ER-negative tumors was validated using a Mann-Witney test. Correlation coefficients were used to compare the gene expression levels to the number of axillary nodes involved.

[0082] Northern Blot Analysis

[0083] Seventy-nine breast tumors, including 22 of the 34 tested on the arrays, were analyzed for GATA3 (SEQ ID No: 78) expression by Northern blot hybridization. RNA extraction from tumor samples and Northern blots were done as previously described (43). The GATA3 probe was prepared from the IMAGE cDNA clone 129757 (SEQ ID No: 78), which corresponds to the 3′ region (from +843 to +1689) of the GATA3 cDNA sequence (GenBank accession no. X55122). The insert (846 bp) was obtained by digestion of the clone with EcoRI and Pael enzymes. Northern blots were stripped and re-hybridized using an â-actin probe (46).

[0084] FIG. 1 shows an example of differential gene expression between normal breast tissue (NB) and breast tumor samples. Each cDNA array on Nylon filter was hybridized with a complex probe made from 5 fg of total RNA. The top image corresponds to the whole membrane. For the two bottom images, only the right portion of the membranes is shown. Numbers below the spots indicate housekeeping genes (1, GAPDH and 2, actin), negative control clones (3, 4 and 5) and examples of genes differentially expressed between NB and breast tumor (6, stromelysin 3 (SEQ ID No: 346); 7, ERBB2 (SEQ ID No: 119); 8, MYBL2 (SEQ ID No: 310); 9, FOS (SEQ ID No: 318); 10, TGFáR 3; 11, desmin (SEQ ID No: 170)), and between ER- breast tumor and ER+ breast tumor (12, GATA3).

[0085] FIG. 2 is a representation of expression levels of 176 genes in normal breast tissue (NB) and 34 samples of breast carcinoma. Each column corresponds to a single tissue, and each row to a single gene. (a) The results are expressed as percentage abundance of individual mRNA within the sample, and are represented using a blue color scale. The color scale (log scale with a 3-fold interval) indicated at the bottom left ranges from light blue (expression level ≧0.001%) to dark blue (expression level >3%). White squares indicate clones with undetectable expression levels and gray squares indicate missing data. The tissue samples are arbitrarily ordered and the clones are ordered from top to bottom according to increasing median expression levels. Horizontal black arrows on the right of the figure mark three clones with highly variable expression levels between the tumors (stromelysin 3 (SEQ ID No: 346), IGF2 (SEQ ID No: 61), GATA3 (SEQ ID No: 78) from top to bottom). (b) The results are shown as relative expression levels (relative to the median value of each row and each column) and are represented with a color scale indicated at the bottom left ranging from 1/100 to 100 fold changes (gray squares: missing data). Eighteen clones with median expression level equal to zero in the 34 tumors are omitted. The clustering program arranges samples (n=35) along the horizontal axis so that those with the most similar expression profiles are placed adjacent to each other. Similarly, clones (n=162) are near each other along the vertical axis if they show a strong expression profile correlation across all tissues. The length of the branches of the dendrograms capturing respectively the samples (top) and the clones (left) reflects the similarity of the related elements. Two groups of tumors are separated and color coded: group A (blue) and group B (orange). Horizontal black and horizontal red arrows on the right of the figure respectively mark three genes with highly variable expression levels between the tumors (IGF2 (SEQ ID No: 61), GATA3 (SEQ ID No: 78), stromelysin 3 (SEQ ID No: 346) from top to bottom) and four pairs of different clones representing four genes. (c) Zoom representation of group A from FIG. 2b, excluding the two outlyer tumors at the right. The clustering separates two subgroups of tumors, A1 and A2. The dotted branches correspond to tumors associated with metastatic relapse and death. Follow-up was longer in A2 than in A1 (median 81 months for A2 versus 47 months for A1).

[0086] FIG. 3 is prognostic classification of breast cancer by gene expression profiling showing that gene expression-based tumor classification correlates with clinical outcome. The 12 samples of group A (see FIG. 2band 2c) were reclustered using the top 32 differentially expressed genes between A1 and A2 subgroups. Data were displayed as in FIG. 2band shown with the same color key. The hierarchical clustering was applied to expression data from the 23 clones, out of 32, of which expression levels presented an at least two-fold change in at least two samples (out of 12). Two subgroups of tumors A1 and A2 are shown as well as two groups of differentially expressed clones. The dotted branches of tumor cluster A1 correspond to samples associated with metastatic relapse and death. FIG. 3a shows two-dimensional representation of hierarchical clustering results shown in FIGS. 2a and 2b. The analysis delineates 4 groups of tumours A, B, C and D. Black squares indicate patients alive at last follow-up visit and red squares indicate patients who died. Three classes of patients with a statistically different clinical outcome were defined according to gene expression profiles: class A (n=16), class B+C (n=34), class D (n=5). FIG. 3b illustrates a Kaplan-Meier plot of overall survival of the 3 classes of patients (p<0.005, log-rank test). And FIG. 3c illustrates a Kaplan-Meier plot of metastasis-free survival of the 3 classes of patients (p<0.05, log-rank test).

[0087] FIG. 4 shows the correlation of GATA3 (SEQ ID No: 78) expression with ER phenotype. (a) The expression levels of GATA3 in 34 breast cancer samples (y axis) monitored by cDNA array analysis are reported in percentage of abundance of individual mRNA with respect to mRNA within the sample (log scale). GATA3 is significantly overexpressed in the ER-positive tumors (n=23) versus the ER-negative tumors (n=11) using the Mann-Witney test (p=0.0004). The expression level of GATA3 in normal breast tissue is reported on the right (NB). (b) Northern blot analysis of GATA3 in normal breast sample (NB) and 9 breast cancer samples (AT: tumor analyzed with cDNA array and Northern blot; NT: tumor analyzed with Northern blot). Blots were probed successively with cDNA from GATA3 (top) and â-actin (bottom). ER status is indicated for each tumor sample.

[0088] Data Representation

[0089] FIG. 1 shows examples of hybridizations of cDNA arrays with probes made from RNA extracted from normal breast tissue and breast tumors.

[0090] The crude results of all hybridizations were processed to be presented either as absolute or relative values in schematic figures. The normalization procedure allowed display of absolute values expressed in percent of abundance of mRNA in the probe as shown in FIG. 2a. Each level of the blue color ladder represents a 3-fold interval of absolute abundance of mRNA. Each column corresponds to a tissue sample and each row to a gene. For graphic purposes, genes were ordered from top to bottom according to increasing median expression levels. Tumor samples were not ordered. The values in each sample displayed a wide range of intensities (3 decades in log scale) corresponding to expression levels ranging from approximately 0.002% to 5% of mRNA abundance. Many genes (see for example stromelysin 3 (SEQ ID No: 346), IGF2 (SEQ ID No: 61) and GATA3 (SEQ ID No: 78), arrows) displayed highly variable expression levels across all tumor samples, scattered over the whole dynamic range of values. A representation of relative values is shown in FIG. 2b. Absolute values were log-transformed, omitting 18 clones whose median intensity was equal to zero across all tissues. Data for each of the 162 remaining clones were then median-centered, as well as data for each sample, so that the relative variation was shown, rather than the absolute intensity. A color scale was used to display data: red for expression level higher than the median and green for expression level lower than the median. The magnitude of the deviation from the median was represented by the color intensity. A hierarchical clustering program was then applied to group the 35 samples according to their overall gene expression profiles, and to group the 162 clones on the basis of similarity of their expression levels in all tissues. This resulted in a picture highlighting groups of correlated tissues and groups of correlated genes as depicted by dendrograms.

[0091] Breast Tumor Classification

[0092] As shown in FIG. 2b, the clustering algorithm identified two groups of samples, designated A (n=15, including normal breast, NB) and B (n=20). These groups were similar with respect to patient age, menopausal status at diagnosis, SBR grading and tumor pathological size. However, 72% of tumors in group A were node-positive and 75% in group B were node-negative. Moreover, 80% of the tumors in group B were estrogen receptor (ER) positive and 50% in group A were ER-negative. With a median follow-up of 44 months after diagnosis, overall survival was different between A and B groups: 5 women died in A (median follow-up 58 months) and 1 in B (median follow-up 40 months). But the frequency of metastatic relapse was relatively similar in the two groups, with 5 women who relapsed in A and 6 in B. Because the time between the diagnosis of metastasis and last follow-up is too short in B, a longer follow-up is needed to determine if these two different groups, defined with expression profiles, have really a different outcome with respect to overall survival.

[0093] In the group A of 15 samples, three samples (normal breast and two tumors) were different from each other and from the other 12 samples. The latter constituted two subgroups of tumors, A1 (n=6) and A2 (n=6), which could be further separated by clustering as shown in FIG. 2c. The 12 tumors had a uniformly high risk of metastatic relapse according to conventional prognostic features as shown in Table 1. Most of them had received comparable adjuvant anthracycline-based chemotherapy after surgery, with more women treated in the A1 subgroup. Interestingly, these two subgroups, which could not be distinguished with commonly used histoclinical features, had a very different clinical outcome: there were 4 metastatic relapses and 4 deaths in A1 (median follow-up: 44 months). In contrast and despite a longer median follow-up (90 months), no metastasis or death occurred in A2. This resulted in a significant better metastasis-free survival (p<0.01) and overall survival (p<0.005) for group A2 than for group A1 tumors. No such subgrouping could be done in B.

TABLE 1

| Subgroup | A1 | | | | | | A2 | | | | | |
|---|---|---|---|---|---|---|---|---|---|---|---|---|
| Tumor position in the cluster | 1 | 2 | 3 | 4 | 5 | 6 | 7 | 8 | 9 | 10 | 11 | 12 |
| Age, years | 46 | 58 | 60 | 63 | 51 | 58 | 46 | 47 | 50 | 47 | 46 | 66 |
| Nodal status | 1 | 0 | 0 | 16 | 13 | 37 | 10 | 4 | 1 | 2 | 0 | 0 |
| Histological size, mm | 60 | 20 | 26 | 35 | 20 | 30 | 27 | 25 | 30 | 25 | 20 | 22 |
| SBR grade | \|\| | \|\|\| | \|\| | \|\|\| | \|\| | \|\|\| | \|\| | \|\| | \|\| | \|\| | \|\| | \|\|\| |
| ER status | neg | neg | neg | neg | neg | neg | pos | neg | pos | pos | pos | pos |
| Adjuvant chemotherapy | yes | yes | no | yes | yes | yes | yes | yes | no | yes | no | no |
| Metastasis | yes | no | yes | yes | no | yes | no | no | no | no | no | no |
| Follow-up, months | 58 | 106 | 35 | 47 | 41 | 31 | 85 | 98 | 95 | 49 | 19 | 141 |
| Patients status | D | A | D | D | A | D | A | A | A | A | A | A |

Patient characteristics in subgroups A1 and A2. The 12 tumors are numbered from 1 to 12 according to their position from left to right in the clustering graphic displayed in FIG. 3. Adjuvant chemotherapy was anthracycline-based. In the line concerning the patient status, A means alive and D means death from cancer progression.

[0094] Genes responsible for group A substructure were searched. These are potentially relevant to the prognosis and the sensitivity to chemotherapy in these tumors. Thirty-two genes out of 188 were identified by comparing their median expression level in A1 vs A2. Then, the 12 tumors were reclustered using the expression profiles of these genes as shown in FIG. 3. The same subgroups A1 and A2 were evident and separated by 2 groups of genes: as expected, high expression of ERBB2 (SEQ ID No: 119), MYC (SEQ ID No: 75) and EGFR (SEQ ID No: 137) was associated with bad prognosis subgroup A1 (6-8), and that of E-cadherin (SEQ ID No: 328) and the proto-oncogene MYB (SEQ ID No: 355) with good prognosis subgroup A2 (9, 10). For most of the other genes, these results may stimulate new investigations. Differentiation state is a good prognostic factor in breast cancer and, accordingly, genes associated with cell differentiation, such as GATA3 (SEQ ID No: 78) (11) and CRABP2 (SEQ ID No: 158) (12), had a high level of expression in the better outcome group. The high expression of Ephrin-Al mRNA in the bad prognosis subgroup suggests a role of this growth factor in breast cancer and can be paralleled with its up-regulation during melanoma progression (13).

[0095] Differential Gene Expression Between Normal Breast and Breast Tumors

[0096] To identify genes differentially expressed between breast tumors (T) and normal breast (NB), the NB value for each gene was compared to its expression level in each tumor. When the expression level of a gene in NB was undetectable, only qualitative information could be deduced and the mRNA was considered as differentially expressed if the signal intensity in the tumor was superior to the reproducibility threshold (0.002% of mRNA abundance). In the other cases, differential expression was defined by an at least 2-fold expression difference. Also, the number of tumors where it was over- or underexpressed was measured. Table 2 shows a list of the top 20 over- and underexpressed genes. For these genes, the T/NB ratio is reported, where T represented their median expression value in the 34 tumors. This ratio ranged from 2.70 (ABCC 5; (SEQ ID No: 325) to 17.76 (GATA3; (SEQ ID No: 78) for the overexpressed genes, and from 0.00 (desmin, (SEQ ID No: 170) to 0.29 (APC; (SEQ ID No: 56) for the underexpressed genes.

TABLE 2

| | | | | |
|---|---|---|---|---|
| Clone ID | Gene/Protein identity | Gene symbol | Chrom. location | N T/NB |

Overexpressed genes

| | | | | |
|---|---|---|---|---|
| 154343 | Granzyme H | GZMH | 14q11.2 | 32 9.51 |
| 235947 | Stromelysin 3 | STMY3 | 22q11.2 | 31 15.92 |
| 207378 | MYB Related Protein B | MYBL2 | 20q13.1 | 31 (a) |
| 153275 | Cellular Retinoic Acid Binding Protein 2 | CRABP2 | 1q21.3 | 29 7.16 |
| 129757 | GATA-binding protein 3 | GATA3 | 10p15 | 28 17.76 |
| 120649 | T-Lymphocyte surface CD2 antigen | CD2 | 1p13.1 | 28 7.54 |
| 109677 | CREB Binding Protein | CREBBP | 16p13.3 | 28 5.08 |
| 172152 | EGFR-binding protein GRB2 | GRB2 | 17q24-q25 | 28 5.00 |
| 66969 | Transcription factor RELB | RELB | 19 | 28 3.61 |
| 182007 | ETS-Related Transcription Factor ELF1 | ELF1 | 13q13 | 27 3.58 |
| 153446 | LIM domain protein RIL | RIL | 5q31.1 | 26 4.03 |
| 203394 | ETS Variant gene 5 (ETS-related molecule) | ETV5 | 3q28 | 25 3.67 |
| 160963 | Thrombospondin 1 | THBS1 | 15q15 | 25 3.39 |
| 188393 | POU domain, class 2, transcription Factor 2 | POU2F2 | 19 | 24 4.02 |
| 187822 | Integrin, beta 2 | ITGB2 | 21q22.3 | 24 3.01 |
| 243907 | Nuclear Factor of Activating T cell Subunit p45 | NF45 | 1 | 24 2.84 |
| 158347 | EST H27202 | EST | | 23 2.91 |
| 230933 | EST AW184517 | EST | | 22 2.85 |
| 212366 | ATP-Binding Cassette, sub-family C (CFTR/MRP), 5 | ABCC5 | 3q27 | 22 2.70 |
| 149401 | Cathepsin D | CTSD | 11p15.5 | 21 2.97 |

Underexpressed genes

| 153854 | Desmin | DES | 2q35 | 34 0.00 |
|---|---|---|---|---|
| 208717 | P55-C-FOS proto-oncogene protein | FOS | 14q24.3 | 33 0.05 |
| 159093 | Transcription Factor AP4 | TFAP4 | 16p13 | 33 0.11 |
| 124340 | Tenascin XA | TNXA | 6p21.3 | 33 0.14 |
| 133738 | Prolactin | PRL | 6p22.2-p21.3 | 32 0.00 |
| 133891 | Chorionic Somatomammotropin Hormone 1 | CSH1 | 17q22-q24 | 32 0.00 |
| 151501 | Tyrosine Kinase Receptor TEK | TEK | 9p21 | 32 0.00 |
| 183030 | Activating Transcription Factor 3 | ATF3 | 1 | 32 0.07 |
| 120916 | Phosphodiesterase I | PDNP2 | 8q24.1 | 32 0.14 |
| 155716 | EST R72075 | EST | | 31 0.00 |
| 208118 | Transforming Growth Factor Beta Receptor Type III | TGFBR3 | 1p33-p32 | 31 0.14 |
| 187547 | Diphtheria Toxin Receptor | DTR | 5q23 | 31 0.17 |
| 108490 | HIV-1 Rev Binding protein | HRB | 2q36 | 31 0.20 |
| 147002 | B-cell CLL/lymphoma 2 | BCL2 | 18q21.3 | 31 0.26 |
| 182610 | Microsomal Glutathione S Transferase 1 | MGST1 | 12p12.3-p12.1 | 31 0.28 |
| 152802 | Phospholipase A2 Membrane Associated, group IIA | PLA2G2A | 1p35 | 30 0.03 |
| 183087 | Interleukin 3 Receptor Alpha chain | IL3RA | Xp22.3; Yp13.3 | 30 0.24 |
| 108571 | Retinoblastoma-Like 2 (p130) | RBL2 | 16q12.2 | 29 0.28 |
| 125294 | Adenomatous Polyposis Coli Protein | APC | 5q21-q22 | 29 0.29 |
| 151767 | FASL Receptor | TNFRSF6 | 10q24.1 | 28 0.27 |
| List of the genes that show the most frequent differential expression between normal breast tissue and 34 breast carcinomas as measured by cDNA array analysis. N indicates the number of tumor samples where the gene is dysregulated (fold change □ 2) compared to normal breast tissue. T/NB represents the ratio: median expression level in 34 breast tumors/expression level in normal breast. (a) MYBL2 transcript displayed a median expression level of 0.025% in breast tumors | | | | |
| # and was undetectable in NB. | | | | |

[0097] High expression of mucin I (SEQ ID No: 58), NM 23, ERBB2 (SEQ ID No: 119), FGFRJ (SEQ ID No: 182) and FGFR 2 (SEQ ID No: 15), MYC (SEQ ID No: 75), stromelysin 3 (SEQ ID No: 346), cathepsin D (SEQ ID No: 128) and downregulation of FOS (SEQ ID No: 318), APC (SEQ ID No: 56), RBL2, FAS, BCL2 (SEQ ID No: 117) were found, reflecting what is known about their biology in cancer. GATA3 (SEQ ID No: 78), which codes for a member of the GATA family of zinc finger transcription factors, and CRABP2 (SEQ ID No: 158), encoding one of the two cellular retinoic acid-binding proteins, showed high expression of mRNA, extending previous results on cDNA arrays (4). Differential gene expression among various breast tumors and correlation with histoclinical prognostic parameters

[0098] To search for potential prognostic markers in breast cancer, genes with expression levels correlated with conventional histoclinical prognostic parameters were looked for: age of patients, axillary node status, tumor size, histological grade and ER status. No significant correlation was found with age, tumor size and histological grade. However, the expression profiles of some genes correlated with ER status and axillary node involvement.

[0099] To identify genes potentially relevant to the hormone-responsive phenotype, the gene expression profiles in ER-positive breast cancers (n=23) versus ER-negative breast cancers (n=11) were compared. Sixteen clones displayed a median intensity of 0 in both groups. Twenty-five presented a fold change superior to 2. Table 3a displays the top 10 over- and underexpressed genes. Among them, the most differentially expressed was GATA3 (SEQ ID No: 78) with a median intensity ratio ER+/ER− of 28.6 and a value for the first quartile of ER-positive tumors superior (5-fold) to the value of the third quartile of the ER-negative tumors as shown in FIG. 4a. The high expression of GATA3 in ER-positive tumors was statistically significant using a Mann-Witney test (p<0.001). All ER-positive tumors and only 18% of ER-negative tumors displayed a GATA3 expression level greatly superior (fold change >3) to the normal breast value. Furthermore GATA3 expression was analyzed by Northern blot hybridization (FIG. 4b) in a panel of 79 breast cancers (21 ER-negative tumors and 58 ER-positive tumors), including 22 of the tumors analyzed with cDNA arrays. It confirmed the array results for those 22 tumors as well as the strong correlation between ER status and GATA3 RNA expression (Mann-Witney test, p<0.0001).

TABLE 3a

| Clone | | | ER+/ |
|---|---|---|---|
| ID | Gene/Protein identity | Gene symbol | ER− |
| 129757 | GATA-binding protein 3 | GATA3 | 28.6 |
| 356763 | Granzyme A | GZMA | 5.7 |
| 248613 | MYB proto-oncogene | MYB | 3.4 |
| 211999 | KIAA1075 protein | KIAA1075 | 3.3 |
| 235947 | Stromelysin 3 | STMY3 | 3.1 |
| 229839 | Macrophage Stimulating 1 | MST1 | 2.8 |
| 153275 | Cellular Retinoic Acid Binding Protein 2 | CRABP2 | 2.7 |
| 301950 | X-box Binding Protein 1 | XBP1 | 2.7 |
| 205314 | Tumor Protein p53 | TP53 | 2.5 |
| 126233 | Insulin-like Growth Factor 2 | IGF2 | 2.4 |
| 66322 | CD3G antigen, Gamma | CD3G | 0.0 |
| 195022 | Interleukin 2 Receptor Gamma chain | IL2RG | 0.0 |
| 111461 | SOX4 Protein | SOX4 | 0.4 |
| 151475 | Epidermal Growth Factor Receptor | EGFR | 0.5 |
| 195022 | Interleukin 2 Receptor Beta chain | IL2RB | 0.5 |
| 130788 | Topoisomerase (DNA) II beta (180 kD) | TOP2B | 0.6 |
| 323948 | SOX9 Protein | SOX9 | 0.6 |
| 183641 | S100 calcium-binding protein Beta | S100B | 0.6 |
| 246620 | EST N53133 | EST | 0.6 |
| 231424 | Glutathione S Transferase Pi | GSTP1 | 0.6 |

[0100] To search for genes whose expression profile was correlated with axillary lymph node status, a strong prognostic factor in breast cancer, the group of node-negative tumors (n=19) was compared with the group of tumors with massive axillary extension (10 or more positive nodes). Furthermore, because survival decreases with the increase of the number of tumor-involved lymph nodes and because the expression measurements were quantitative, correlation between the expression levels of these genes and the number of tumor-involved nodes (quantitative variables) was determined. Table 3bshows a list of the top 10 over- and underexpressed genes between these 2 groups. Most of these genes have not been previously reported as associated with node status, but some of these results are in agreement with literature data. The gene encoding the tyrosine kinase receptor ERBB2 (SEQ ID No: 119) was the most significantly overexpressed gene in node-positive tumors and displayed the highest correlation coefficient (r=0.68; p<0.0001).

TABLE 3b

| Clone | | | N−/ |
|---|---|---|---|
| ID | Gene/Protein identity | Gene symbol | 10N+ |
| 129757 | GATA-binding protein 3 | GATA3 | 11.0 |
| 160963 | Thrombospondin 1 | THBS1 | 6.6 |
| 151475 | Epidermal Growth Factor Receptor | EGFR | 5.4 |
| 120916 | Phosphodiesterase I | PDNP2 | 4.9 |
| 183030 | Activating Transcription Factor 3 | ATF3 | 4.6 |
| 211999 | KIAA1075 protein | KIAA1075 | 4.5 |
| 110480 | Nuclear Factor 1 A-type | NF1A | 4.5 |
| 182264 | P-Selectin | SELP | 4.4 |
| 356763 | Granzyme A | GZMA | 4.3 |
| 214008 | E-cadherin | CDH1 | 4.0 |
| 147016 | ERBB2 Receptor Protein-Tyrosine Kinase | ERBB2 | 0.2 |
| 179197 | Protein Phosphatase PP2A, 55 kD Subunit | PP2A BR | 0.2 |
| | | gamma | |
| 231424 | Glutathione S Transferase Pi | GSTP1 | 0.4 |
| 111461 | SOX4 Protein | SOX4 | 0.4 |
| 195022 | Interleukin 2 Receptor Beta chain | IL2RB | 0.4 |
| 220451 | Zinc Finger protein 144 | ZNF144 | 0.5 |
| 125413 | Mucin 1 | MUC1 | 0.6 |
| 290007 | CD44 antigen, epithelial form | CD44 | 0.6 |
| 108571 | Retinoblastoma-Like 2 (p130) | RBL2 | 0.7 |
| 130788 | Topoisomerase (DNA) II Beta (180 kD) | TOP2B | 0.7 |

List of genes differentially expressed between ER-positive and ER-negative breast tumors (a) and between axillary lymph node-negative tumors and tumors with 10 or more involved lymph nodes (b).

[0101] Gene clustering from FIG. 2b showed groups of genes with correlated expression across samples. When different clones represented the same gene, they were clustered next to each other (red arrows). Correlation coefficients between gene pairs in the 34 tumors were often high (1% of the 13,041 gene pairs showed a correlation coefficient superior to 0.95—not shown). An example of highly correlated gene expression is that of BCL2 (SEQ ID No: 117) and RBL2. Such correlated expression, although it has not been described in the literature, probably reflects a common mechanism of regulation for these two genes. Furthermore, these genes also exhibited significant correlated expression with other genes such as PPP2CA (SEQ ID No;184), AKT2 (SEQ ID No: 254), PRKCSH (SEQ ID No: 264) or TNFRSF6/FAS SEQ ID No.143). In particular, a striking correlated expression between BCL2 and FAS could be observed (r=0.91; data not shown). The exact meaning of this correlation is unknown, although it may reflect the necessary balance between apoptosis and anti-apoptosis for cell survival.

[0102] Although in human cancer the proportion of changes that is reflected at the RNA level is not known, monitoring gene expression patterns appears as a very promising way of increasing the knowledge of the disease. Several different types of cancer have been investigated using cDNA arrays: cervical (14), hepatocellular (15), ovarian (16), colon (17) and renal carcinomas (18), glioblastomas (19), melanomas (20) (21), rhabdomyosarcomas (22), acute leukemias (23) and lymphomas (24). In breast cancer, pioneering studies have yielded the first expression patterns (4, 25-31). They have in particular addressed the important issue of molecular differences in hormone-responsive and non-responsive breast tumors. Thus, Yang et al. (28) and Hoch et al. (25) compared expression profiles of breast carcinoma cell lines known to represent these two categories and identified a few genes with differential expression. One of these genes was GATA3. In these studies, cell lines were mostly used and tumor samples were rarely tested and generally in small numbers. The first study analyzing the expression profiles of a large series of breast cancers was published recently (32), but no correlation with clinical outcome was mentioned.

[0103] Several interesting points can be made based on the present experimentation. First, the differences in expression patterns among the tumors provided molecular transcriptional evidence of the histoclinical heterogeneity of breast cancer. This diversity was multifactorial, linked to many different genes, highlighting the interest of high throughput analysis in this context. It was possible, with a hierarchical clustering program integrating the expression profiles, to separate normal breast tissue from most tumors and, moreover, to identify two different groups of tumors. Most importantly, two different subgroups of tumors with a very distinct clinical outcome that could not be predicted with classical prognostic factors have been identified by clustering. Indeed, all these tumors had a theoretically bad prognosis as evaluated by current histoclinical tools. All these patients would be at the present time treated with adjuvant chemotherapy, but without the capacity for the physicians to identify patients who will benefit from this treatment and those who will not benefit.

[0104] Gene expression profiles were able to make this discrimination. Such predictive tools have important therapeutic implications. Patients with features of poor prognosis are candidates for other treatment than standard chemotherapy, avoiding loss of time and toxicities related to first-line chemotherapy. These results suggest that the histoclinical category of poor prognosis breast cancer, currently treated with adjuvant anthracycline-based chemotherapy, groups together at least two molecularly distinct subgroups of tumors with different outcome which would require distinct chemotherapy regimens. Expression profiles could thus provide a new and more accurate way of classifying breast tumors of poor prognosis and managing patients.

[0105] Similarly, despite molecular heterogeneity, significant correlations between the expression level of genes (GATA3 (SEQ ID No: 78), ERBB2 (SEQ ID No: 119)) and histological tumor parameters were identified. The ER-positivity in breast cancer has been correlated with tumor differentiation, low proliferating rate, favorable prognosis and response to hormonal therapy. The relation between hormone sensitivity of breast cancer and ER status is not perfect, and it is possible that some genes related to ER expression are more important than ER to characterize the hormone-sensitive phenotype. These genes could serve as predictive factors to guide the therapy.

[0106] GATA3 mRNA expression was highly correlated with ER status. GATA3, which is not estrogen-regulated (25), is a transcription factor that could regulate the expression of genes involved in the ER-positive phenotype. Among the other genes that were found associated with ER status during the experimental work leading to the present invention, some, such as MYB (SEQ ID No: 355) (10), stromelysin 3 (SEQ ID No: 346) (33), and CRABP2 (SEQ ID No: 158) (34), have been previously reported expressed at high levels in ER-positive breast tumors. The higher levels of TP53 MnRNA in ER-positive tumors studied were surprising, although in agreement with a recent study (27). Most studies concerning TP53 expression analyzed the protein level rather than the mRNA level, and TP53 protein levels are classically negatively correlated with the ER status (35). The high expression of CRABP2 could be related to the better differentiated status of the ER-positive tumors. The low expression of the three immunity-related genes IL2RB (SEQ ID No: 99), IL2RG (SEQ ID No: 281) and CD3G (SEQ ID No: 416) may be related to the low lymphoid infiltration in these well differentiated tumors. ERBB2 high expression in breast cancer has been associated with a poor prognosis and some resistance to hormonal therapy and chemotherapy (36). It is involved in the regulation of cellular differentiation, adhesion, and motility. The motility-enhancing activity of ERBB2 (37) could be responsible for the increased metastatic potential and the unfavorable prognosis of the breast tumors that overexpress ERBB2. The low expression of E-cadherin (SEQ ID No: 328) and thrombospondin 1 (SEQ ID No: 217) in node-positive tumors are consistent with their putative role in different steps of metastatic spread: E-cadherin is an epithelial cell adhesion molecule whose disturbance is a prerequisite for the release of invasive cells in carcinomas (38) and thrombospondin 1 inhibits angiogenesis (39). Similarly, the high expression of the molecule surface antigen Mucin 1 in node-positive tumors (40) can reduce cell-cell interactions facilitating cell detachment and metastasis. CD44 (SEQ ID No: 376), encoding a transmembrane glycoprotein involved in cell adhesion and lymph node homing (41) was expressed at high levels in node-positive tumors as well as GSTPI (SEQ ID No: 336) (Glutathione-S-Transferase Pi), recently reported associated with increased tumor size (27).

[0107] Second, there were a number of genes with highly correlated expression patterns. Gene correlations have already been reported with larger series of genes, essentially under dynamic experimental conditions (42) and recently in steady states (17). Here, correlations were based on expression profiles of a relatively small but selected series of genes and in steady states represented by different breast tumors. Gene correlations are potentially useful tools for cancer research in two ways: i) they can provide information about the general regulation circuitry of a cancerous cell, allowing the identification of regulatory elements controlling expression networks; ii) they offer the possibility of reducing the complexity of the system analyzed by replacing, for example, the intensities of a large number of genes present in a gene cluster by their respective mean intensities.

[0108] Finally, these results highlight the great potential of cDNA array in cancer research. The gene expression profiles confirmed the heterogeneity of breast cancer, and most importantly allowed us to identify, among a series of poor prognosis breast tumors, two subtypes of the disease not yet recognized with usual histoclinical parameters but with a different clinical outcome after adjuvant chemotherapy. Furthermore, the present invention allows detection of genes of which expression was correlated with classical prognostic factors.

[0109] Table 4 displays a library of polynucleotides SEQ ID NO: 1 to SEQ ID NO: 468 corresponding to a population of polynucleotide sequences underexpressed or overexpressed in cells derived from tumors, more particularly breast tumors, and their respective complements.

TABLE 4
CORRELATION BETWEEN SEQ ID NO AS FILED WITH US PROVISIONAL APPLICATION
N^{o} 60/254,090 and SEQ ID NO FILLED WITH NEW APPLICATION

| Gene | | | | Provisional | Provisional | Current, | Current, | Current, |
|---|---|---|---|---|---|---|---|---|
| Symbols | N^{o} | Name | Image | Seq3′ | Seq5′ | Seq3′ | Seq5′ | (mRNA) |
| GATA3 | 1 | GATA-binding pro- | 129757 | SEQ ID No:1 | | SEQ ID No:76 | SEQ ID No:77 | SEQ ID No:78 |
| | | tein 3 (GATA3) | | | | | | |
| MYB | 2 | v-myb avian myelo- | 248613 | | SEQ ID No:2 | 0 | SEQ ID No:354 | SEQ ID No:355 |
| | | blastosis viral onco- | | | | | | |
| | | gene homolog | | | | | | |
| | | (MYB) | | | | | | |
| KIAA 1075 | 3 | KIAA 1075 protein | 211999 | SEQ ID No:3 | SEQ ID No:4 | SEQ ID No:322 | SEQ ID No:323 | 0 |
| STMY3 | 4 | matrix metallopro- | 235947 | SEQ ID No:5 | | SEQ ID No:345 | 0 | SEQ ID No:346 |
| | | teinase 11 (strom- | | | | | | |
| | | elysin 3) (MMP11) | | | | | | |
| | | (ex STMY3) | | | | | | |
| HGFL | 5 | macrophage-stim- | 229839 | SEQ ID No:6 | SEQ ID No:7 | SEQ ID No:331 | SEQ ID No:332 | SEQ ID No:333 |
| | | ulating protein | | | | | | |
| | | (MST1) (ex HGFL) | | | | | | |
| CRABP | 6 | cellular retinoic | 153275 | SEQ ID No:8 | SEQ ID No:9 | SEQ ID No:156 | SEQ ID No:157 | SEQ ID No:158 |
| | | acid-binding protein | | | | | | |
| | | 2 (CRABP2) | | | | | | |
| XBP1 | 7 | X-box binding pro- | 301950 | SEQ ID No:10 | SEQ ID No:11 | SEQ ID No:385 | SEQ ID No:386 | SEQ ID No:387 |
| | | tein 1 (XBP1) | | | | | | |
| TP53 | 8 | tumor protein p53 | 205314 | | SEQ ID No:12 | SEQ ID No:442 | 0 | 0 |
| | | (Li-Fraumeni syn- | | | | | | |
| | | drome) (TP53) | | | | | | |
| IGF2 | 9 | insulin-like growth | 126233 | SEQ ID No:13 | SEQ ID No:14 | SEQ ID No:59 | SEQ ID No:60 | SEQ ID No:61 |
| | | factor 2 (somato- | | | | | | |
| | | medin A) (IGF2), | | | | | | |
| CD3G | 10 | CD3G antigen, | 66322 | SEQ ID No:15 | SEQ ID No:16 | SEQ ID No:414 | SEQ ID No:415 | SEQ ID No:416 |
| | | gamma polypeptide | | | | | | |
| | | (TiT3 complex) | | | | | | |
| | | (CD3G) | | | | | | |
| IL2RG | 11 | interleukin 2 recep- | 195022 | SEQ ID No:17 | SEQ ID No:18 | SEQ ID No:279 | SEQ ID No:280 | SEQ ID No:281 |
| | | tor, gamma (severe | | | | | | |
| | | comnbined immuno- | | | | | | |
| | | deficiency) (IL2RG) | | | | | | |
| SOX4 | 12 | SRY (sex determin- | 111461 | SEQ ID No:19 | SEQ ID No:20 | SEQ ID No:22 | SEQ ID No:23 | SEQ ID No:24 |
| | | ing region Y)-box 4 | | | | | | |
| | | (SOX4) | | | | | | |
| EGFR | 13 | epidermal growth | 151475 | SEQ ID No:21 | SEQ ID No:22 | SEQ ID No:135 | SEQ ID No:136 | SEQ ID No:137 |
| | | factor receptor | | | | | | |
| | | (avian erythroblastic | | | | | | |
| TOP2B | 14 | topIIb mRNA for | 130788 | | SEQ ID No:23 | 0 | SEQ ID No:82 | SEQ ID No:83 |
| | | topoisomerase IIb. | | | | | | |
| S100B | 15 | S100 calcium-bind- | 183641 | | SEQ ID No:24 | 0 | SEQ ID No:255 | SEQ ID No:256 |
| | | ing protein, beta | | | | | | |
| | | (neural) (S100B) | | | | | | |
| EST N53133 | 16 | EST N53133 | 246620 | SEQ ID No:25 | | SEQ ID No:352 | 0 | SEQ ID No:353 |
| GSTP1 | 17 | glutathione S-trans- | 231424 | SEQ ID No:26 | SEQ ID No:27 | SEQ ID No:334 | SEQ ID No:335 | SEQ ID No:336 |
| | | ferase pi (GSTP1) | | | | | | |
| THBS1 | 18 | thrombospondin 1 | 160963 | SEQ ID No:28 | | SEQ ID No:216 | 0 | SEQ ID No:217 |
| | | (THBS1) | | | | | | |
| PDNP2 | 19 | cctonucleotide | 120916 | SEQ ID No:29 | SEQ ID No:30 | SEQ ID No:39 | SEQ ID No:40 | SEQ ID No:41 |
| | | pyrophosphatase/ | | | | | | |
| | | phosphodiesterase | | | | | | |
| | | 2(autotaxin) | | | | | | |
| | | (ENPP2) (ex | | | | | | |
| | | PDNP2) | | | | | | |
| ATF3 | 20 | activating transcrip- | 183030 | SEQ ID No:31 | SEQ ID No:32 | SEQ ID No:250 | SEQ ID No:251 | SEQ ID No:252 |
| | | tion factor 3 (ATF3) | | | | | | |
| NF1A | 21 | (ex NF1A) | 110480 | SEQ ID No:33 | | SEQ ID No:16 | 0 | 0 |
| SELP | 22 | selectinm P (granule | 182264 | | SEQ ID No:34 | SEQ ID No:438 | SEQ ID No:439 | 0 |
| | | membrane protein | | | | | | |
| | | 140kD, antigen | | | | | | |
| | | CD62) (SELP) | | | | | | |
| CDH1 | 23 | cadherin 1, E- | 214008 | SEQ ID No:35 | SEQ ID No:36 | SEQ ID No:326 | SEQ ID No:327 | SEQ ID No:328 |
| | | cadherin (epi- | | | | | | |
| | | thelial) (CDH1) | | | | | | |
| ERBB2 | 24 | v-erb-b2 avian | 147016 | SEQ ID No:37 | | 0 | SEQ ID No:118 | SEQ ID No:119 |
| | | erythroblastic | | | | | | |
| | | leukemia viral | | | | | | |
| | | oncogene homolog | | | | | | |
| | | 2 (neuro/ | | | | | | |
| | | glioblastoma | | | | | | |
| | | derived oncogene | | | | | | |
| | | homolog) (ERBB2) | | | | | | |
| PP2A BR | 25 | (PP2A BR gamma) | 179197 | SEQ ID No:38 | SEQ ID No:39 | SEQ ID No:238 | SEQ ID No:239 | 0 |
| gamma | | | | | | | | |
| ZNF144 | 26 | zinc finger pro- | 220451 | SEQ ID No:40 | SEQ ID No:41 | 0 | SEQ ID No:329 | SEQ ID No:330 |
| | | tein 144 (Mel-18) | | | | | | |
| | | (ZNF144) | | | | | | |
| MUC1 | 27 | mucin 1, transmem- | 125413 | | SEQ ID No:42 | 0 | SEQ ID No:57 | SEQ ID No:58 |
| | | brane (MUC1) | | | | | | |
| CD44 | 28 | CD44E (epithelial | 290007 | SEQ ID No:43 | SEQ ID No:44 | SEQ ID No:374 | SEQ ID No:375 | SEQ ID No:376 |
| | | form) | | | | | | |
| PLA2G2A | 29 | phospholipase A2, | 152802 | SEQ ID No:45 | SEQ ID No:46 | SEQ ID No:147 | SEQ ID No:148 | SEQ ID No:149 |
| | | group IIA (plate- | | | | | | |
| | | lets, synovial | | | | | | |
| | | fluid) (PLA2G2A), | | | | | | |
| | | nuclear gene | | | | | | |
| | | encoding mito- | | | | | | |
| | | chondrial protein | | | | | | |
| ACVRL1 | 30 | activin A receptor | 153350 | SEQ ID No:47 | SEQ ID No:48 | SEQ ID No:159 | SEQ ID No:160 | SEQ ID No:161 |
| | | type II-like | | | | | | |
| | | 1 (ACVRL1) | | | | | | |
| AXL | 31 | AXL receptor tyro- | 112500 | SEQ ID No:49 | SEQ ID No:50 | SEQ ID No:27 | SEQ ID No:28 | SEQ ID No:29 |
| | | sine kinase (AXL) | | | | | | |
| PKU-ALPHA | 32 | KU-alpha, partial | 109569 | | SEQ ID No:51 | 0 | SEQ ID No:5 | SEQ ID No:6 |
| | | cds (new gene | | | | | | |
| | | symbol Tlk2) | | | | | | |
| ABCC5 | 33 | ATP-binding | 212366 | | SEQ ID No:52 | 0 | SEQ ID No:324 | SEQ ID No:325 |
| | | cassette, sub- | | | | | | |
| | | family C (CFTR/ | | | | | | |
| | | MRP), member | | | | | | |
| | | 5 (ABCC5) | | | | | | |
| EDNRB | 34 | endothelial recep- | 154244 | | SEQ ID No:53 | 0 | SEQ ID No:176 | SEQ ID No:177 |
| | | tor type B | | | | | | |
| | | (EDNRB), trans- | | | | | | |
| | | cript variant1 | | | | | | |
| DTR | 35 | diphtheria toxin | 187547 | | SEQ ID No:54 | 0 | SEQ ID No:265 | SEQ ID No:266 |
| | | receptor (hep- | | | | | | |
| | | arin-binding | | | | | | |
| | | epidermal | | | | | | |
| IGF1R | 36 | insulin-like | 150361 | | SEQ ID No:55 | 0 | SEQ ID No:129 | SEQ ID No:130 |
| | | growth factor 1 | | | | | | |
| | | receptor (IGF1R) | | | | | | |
| KIAA0427 | 37 | KIAA0427 | 127507 | SEQ ID No:56 | SEQ ID No:57 | SEQ ID No:65 | SEQ ID No:66 | SEQ ID No:67 |
| CD69 | 38 | CD69 antigen (p60, | 276727 | | SEQ ID No:58 | 0 | SEQ ID No:370 | SEQ ID No:371 |
| | | early, T-cell | | | | | | |
| | | activation anti- | | | | | | |
| | | gen) | | | | | | |
| FGFR4 | 39 | fibroblast | 116781 | SEQ ID No:59 | SEQ ID No:60 | SEQ ID No:36 | SEQ ID No:37 | SEQ ID No:38 |
| | | growth factor | | | | | | |
| | | receptor 4 | | | | | | |
| | | (FGFR4) | | | | | | |
| EST T85683 | 40 | EST T85683 cathe- | 112622 | | SEQ ID No:61 | 0 | SEQ ID No:30 | SEQ ID No:31 |
| | | spin B (CTSB) | | | | | | |
| EST R00569 | 41 | EST R00569 IL2- | 123871 | | SEQ ID No:62 | 0 | SEQ ID No:44 | SEQ ID No:45 |
| | | inducible T- | | | | | | |
| | | cell kinase (ITK) | | | | | | |
| TGFBR3 | 42 | transforming growth | 208118 | SEQ ID No:63 | SEQ ID No:64 | SEQ ID No:311 | SEQ ID No:312 | SEQ ID No:313 |
| | | factor, beta | | | | | | |
| | | receptor III | | | | | | |
| | | (TGFBR3) | | | | | | |
| INSR | 43 | insulin receptor | 151149 | | SEQ ID No:65 | 0 | SEQ ID NO;131 | SEQ ID No:132 |
| | | (INSR) | | | | | | |
| MARK3 | 44 | MAP/microtubule | 110599 | SEQ ID No:66 | SEQ ID No:67 | #N/A | #N/A | #N/A |
| | | affinity-reg- | | | | | | |
| | | ulating kinase 3 | | | | | | |
| | | (MARK3) | | | | | | |
| TIMP2 | 45 | tissue inhibitor | 131504 | | SEQ ID No:68 | 0 | SEQ ID No:86 | SEQ ID No:87 |
| | | of metallopro- | | | | | | |
| | | teinase 2 (TIMP2) | | | | | | |
| EST R85557 | 46 | EST R85557 throm- | 180219 | SEQ ID No:69 | | SEQ ID No:240 | 0 | SEQ ID No:241 |
| | | bospondin 3 | | | | | | |
| | | (THBD3) | | | | | | |
| GNRH1 | 47 | gonadotropin-releas- | 192688 | | SEQ ID No:70 | 0 | SEQ ID No:277 | SEQ ID No:278 |
| | | ing hormone 1 | | | | | | |
| | | (GNHR1) | | | | | | |
| FGFR2 | 48 | fibroblast growth | 110387 | SEQ ID No:71 | SEQ ID No:72 | SEQ ID No:13 | SEQ ID No:14 | SEQ ID No:15 |
| | | factor receptor | | | | | | |
| | | 2 (FGFR2) | | | | | | |
| NFKB2 | 49 | NFKB2 | 114879 | SEQ ID No:73 | | SEQ ID No:35 | 0 | 0 |
| VIL2 | 50 | villin 2 (ezrin) | 124701 | SEQ ID No:74 | SEQ ID No:75 | SEQ ID No:51 | SEQ ID No:52 | SEQ ID No:53 |
| | | (VIL2) | | | | | | |
| ENG | 51 | endoglin (ENG) | 156979 | SEQ ID No:76 | SEQ ID No:77 | SEQ ID No:196 | SEQ ID No:197 | SEQ ID No:198 |
| EPHA2 | 52 | EphA2 (EPHA2) | 162004 | SEQ ID No:78 | | SEQ ID No:221 | 0 | SEQ ID No:222 |
| CREM | 53 | cAMP responsive | 258584 | SEQ ID No:79 | SEQ ID No:80 | SEQ ID No:358 | SEQ ID No:359 | SEQ ID No:360 |
| | | element modulator | | | | | | |
| | | (CREM) | | | | | | |
| ETV5-a | 54 | ets variant | 270549 | SEQ ID No:81 | SEQ ID No:82 | SEQ ID No:368 | SEQ ID No:369 | SEQ ID No:300 |
| | | gene 5 (ETV5) | | | | | | |
| EST N68536 | 55 | EST N68536 MAX- | 298242 | SEQ ID No:83 | SEQ ID No:84 | 0 | SEQ ID No:380 | SEQ ID No:381 |
| | | interacting pro- | | | | | | |
| | | tein 1 (MX11) | | | | | | |
| EST R81126 | 56 | EST R81126 lym- | 146635 | SEQ ID No:85 | SEQ ID No:86 | SEQ ID No:114 | 0 | 0 |
| | | photoxin beta re- | | | | | | |
| | | ceptor (LTBR) | | | | | | |
| POU2F2 | 57 | (POu2F2) | 188393 | SEQ ID No:87 | SEQ ID No:88 | SEQ ID No:271 | 0 | SEQ ID No:272 |
| FLI1 | 58 | Friend leukemia vir- | 198144 | SEQ ID No:89 | SEQ ID No:90 | SEQ ID No:293 | SEQ ID No:294 | SEQ ID No:295 |
| | | us integration 1 | | | | | | |
| | | (FLI1) | | | | | | |
| TIE | 59 | tyrosine kinase with | 144081 | | SEQ ID No:91 | 0 | SEQ ID No:109 | SEQ ID No:110 |
| | | immunoglobulin and | | | | | | |
| | | epidermal growth | | | | | | |
| | | factor homology | | | | | | |
| | | domains | | | | | | |
| | | (TIE) | | | | | | |
| PRLR | 60 | prolactin receptor | 138788 | SEQ ID No:92 | SEQ ID No:93 | SEQ ID No:94 | SEQ ID No:95 | SEQ ID No:96 |
| | | (PRLR) | | | | | | |
| PPP3CA | 61 | protein phosphatase | 110481 | SEQ ID No:94 | SEQ ID No:95 | SEQ ID No:17 | SEQ ID No:18 | SEQ ID No:19 |
| | | 3 (formerly 2B), | | | | | | |
| | | catalytic subunit, | | | | | | |
| | | gamma isoform | | | | | | |
| | | (calcineurin A | | | | | | |
| | | gamma) (PPP3CC) | | | | | | |
| | | (ex PPP3CA) | | | | | | |
| PTPN2 | 62 | protein tyrosine | 161451 | SEQ ID No:96 | SEQ ID No:97 | SEQ ID No:218 | SEQ ID No:219 | SEQ ID No:220 |
| | | phosphatase, non-re- | | | | | | |
| | | ceptor type 2 | | | | | | |
| | | (PTPN2) | | | | | | |
| PGF | 63 | placental growth | 139326 | | SEQ ID No:98 | 0 | SEQ ID No:102 | SEQ ID No:103 |
| | | factor, vascular | | | | | | |
| | | endothelial growth | | | | | | |
| | | factor-related | | | | | | |
| | | protein (PGF) | | | | | | |
| TNFAIP3 | 64 | tumor necrosis | 309943 | SEQ ID No:99 | | SEQ ID No:388 | SEQ ID No:389 | SEQ ID No:390 |
| | | factor, alpha-in- | | | | | | |
| | | duced protein 3 | | | | | | |
| | | (TNFAIP3) | | | | | | |
| PHB | 65 | PHB (prohibitin) | 236008 | SEQ ID No:100 | | SEQ ID No:347 | SEQ ID No:348 | SEQ ID No:349 |
| RIL | 66 | LIM domain pro- | 153446 | | SEQ ID No:101 | 0 | SEQ ID No:162 | SEQ ID No:163 |
| | | tein (RIL) | | | | | | |
| MYBL2 | 67 | v-myb avian mye- | 207378 | SEQ ID No:102 | SEQ ID No:103 | SEQ ID No:308 | SEQ ID No:309 | SEQ ID No:310 |
| | | loblastosis viral | | | | | | |
| | | oncogene homolog- | | | | | | |
| | | like 2 (MYBL2) | | | | | | |
| RELB | 68 | v-rel avian retic- | 66969 | SEQ ID No:104 | SEQ ID No:105 | SEQ ID No:417 | SEQ ID No:418 | SEQ ID No:419 |
| | | uloendotheliosis | | | | | | |
| | | viral oncogene | | | | | | |
| | | homolog B (nuclear | | | | | | |
| | | factor of kappa light | | | | | | |
| | | polypeptide gene | | | | | | |
| | | enhancer in B-cells | | | | | | |
| | | 3) (RELB) | | | | | | |
| EST R97218 | 69 | Est R97218 | 200394 | SEQ ID No:106 | | SEQ ID No:296 | SEQ ID No:297 | 0 |
| GZMH | 70 | granzyme B (gran- | 154343 | SEQ ID No:107 | | SEQ ID No:178 | 0 | SEQ ID No:179 |
| | | zyme 2, cytotoxic | | | | | | |
| | | T-lymphocyte-ass- | | | | | | |
| | | ociated serine es- | | | | | | |
| | | terase 1) (GZMB) | | | | | | |
| | | (ex GZMH) | | | | | | |
| MYC | 71 | c-myc proto-onco- | 129438 | SEQ ID No:108 | SEQ ID No:109 | SEQ ID No:73 | SEQ ID No:74 | SEQ ID No:75 |
| | | gene | | | | | | |
| CASP1 | 72 | caspase 4, apop- | 131502 | | SEQ ID No:110 | SEQ ID No:84 | 0 | SEQ ID No:85 |
| | | tosis-related cy- | | | | | | |
| | | steine protease | | | | | | |
| | | (CASP4) (ex | | | | | | |
| | | CASP1) | | | | | | |
| SYK | 73 | spleen tyrosine | 128142 | SEQ ID No:111 | SEQ ID No:112 | SEQ ID No:68 | SEQ ID No:69 | SEQ ID No:70 |
| | | kinase (SYK) | | | | | | |
| EST H27202 | 74 | EST H27202 trans- | 158347 | SEQ ID No:113 | SEQ ID No:114 | SEQ ID No:204 | SEQ ID No:205 | 0 |
| | | cription factor | | | | | | |
| | | E1AF gene | | | | | | |
| HRB | 75 | syndecan 1) | 108490 | SEQ ID No:115 | SEQ ID No:116 | SEQ ID No:1 | 0 | SEQ ID No:2 |
| | | (SDC1) (ex HRB) | | | | | | |
| SHC1 | 76 | p66shc (SHC) | 153548 | | SEQ ID No:117 | 0 | SEQ ID No:164 | SEQ ID No:165 |
| CSF1 | 77 | colony stimulating | 124554 | SEQ ID No:118 | SEQ ID No:119 | SEQ ID No:48 | SEQ ID No:49 | SEQ ID No:50 |
| | | factor 1 (CSF1) | | | | | | |
| UBE3A | 78 | ubiquitin protein | 141924 | | SEQ ID No:120 | 0 | SEQ ID No:104 | SEQ ID No:105 |
| | | ligase E3A | | | | | | |
| | | (UBE3A) | | | | | | |
| FKHR | 79 | forkhead box | 151247 | | SEQ ID No:121 | 0 | SEQ ID No:133 | SEQ ID No:134 |
| | | O1A (rhabdomyo- | | | | | | |
| | | sarcoma) | | | | | | |
| | | (FOXO1A) (ex | | | | | | |
| | | FKHR) | | | | | | |
| CSF1R | 80 | colony stimulating | 196282 | SEQ ID No:122 | | SEQ ID No:291 | 0 | SEQ ID No:292 |
| | | factor 1 re- | | | | | | |
| | | ceptor (CSF1R) | | | | | | |
| IFI75 | 81 | interferon-induced | 205612 | SEQ ID No:123 | SEQ ID No:124 | SEQ ID No:305 | SEQ ID No:306 | SEQ ID No:307 |
| | | protein 75 (IFI75) | | | | | | |
| GATA1 | 82 | GATA-binding pro- | 109093 | | SEQ ID No:125 | 0 | SEQ ID No:3 | SEQ ID No:4 |
| | | tein 1 (globin | | | | | | |
| | | transcription | | | | | | |
| | | factor 1) (GATA1) | | | | | | |
| STAT1 | 83 | signal transducer | 110101 | | SEQ ID No:126 | 0 | SEQ ID No:11 | SEQ ID No:12 |
| | | and activator of | | | | | | |
| | | transcription 1 | | | | | | |
| | | (STAT1) | | | | | | |
| CREBBP | 84 | CREB binding pro- | 109677 | SEQ ID No:127 | SEQ ID No:128 | SEQ ID No:7 | SEQ ID No:8 | 0 |
| | | tein (Rubinstein- | | | | | | |
| | | Taybi syndrome) | | | | | | |
| | | (CREBBP) | | | | | | |
| IL7R | 85 | interleukin 7 | 129059 | | SEQ ID No:129 | 0 | SEQ ID No:71 | SEQ ID No:72 |
| | | receptor (IL7R) | | | | | | |
| ANXA7 | 86 | annexin A7 | 160580 | | SEQ ID No:130 | 0 | SEQ ID No:214 | SEQ ID No:215 |
| | (AN- | | | | | | | |
| | XA7) | | | | | | | |
| TNXA | 87 | tenascin XA | 124340 | | SEQ ID No:131 | 0 | SEQ ID No:46 | SEQ ID No:47 |
| | (TN- | | | | | | | |
| | XA) | | | | | | | |
| CNBP1 | 88 | zinc finger pro- | 251963 | SEQ ID No:132 | | SEQ ID No:356 | 0 | SEQ ID No:357 |
| | | tein 9 (a cellular | | | | | | |
| | | retroviral nucleic | | | | | | |
| | | acid binding pro- | | | | | | |
| | | tein) (ZNF9) (ex | | | | | | |
| | | CNBP1) | | | | | | |
| CDK4-a | 89 | cyclin-dependent | 204586 | SEQ ID No:133 | SEQ ID No:134 | SEQ ID No:301 | SEQ ID No:302 | SEQ ID No:288 |
| | | kinase 4 (CDK4) | | | | | | |
| CSNK2B | 90 | gene for casein | 153879 | | SEQ ID No:135 | 0 | SEQ ID No:171 | SEQ ID No:172 |
| | | kinase II subunit | | | | | | |
| | | beta (EC 2.7.1.37). | | | | | | |
| EFNA1 | 91 | ephrin-A1 (EFNA1) | 162997 | | SEQ ID No:136 | 0 | SEQ ID No:226 | SEQ ID No:227 |
| SELE | 92 | selectin E (endo- | 186132 | SEQ ID No:137 | SEQ ID No:138 | SEQ ID No:259 | SEQ ID No:260 | SEQ ID No:261 |
| | | thelial adhesion | | | | | | |
| | | molecule 1) (SELE) | | | | | | |
| APC | 93 | adenomatosis poly- | 125294 | SEQ ID NO:139 | SEQ ID No:140 | SEQ ID No:54 | SEQ ID No:55 | SEQ ID No:56 |
| | | posis coli (APC) | | | | | | |
| FAK | 94 | PTK2 protein tyro- | 195731 | | SEQ ID No:141 | 0 | SEQ ID No:284 | SEQ ID No:285 |
| | | sine kinase 2 | | | | | | |
| | | (PTK2) (ex FAK) | | | | | | |
| FOS-a | 95 | v-fos FBJ murine | 208717 | | SEQ ID No:142 | 0 | SEQ ID No:317 | SEQ ID No:318 |
| | | osteosarcoma | | | | | | |
| | | viral oncogene | | | | | | |
| | | homolog (FOS) | | | | | | |
| FGFR1 | 96 | fibroblast growth | 154472 | SEQ ID No:143 | SEQ ID No:144 | SEQ ID No:180 | SEQ ID No:181 | SEQ ID No:182 |
| | | factor receptor | | | | | | |
| | | (FGFr) | | | | | | |
| MC1R | 97 | melanocortin 1 re- | 155691 | | SEQ ID No:145 | 0 | SEQ ID No:187 | SEQ ID No:188 |
| | | ceptor (alpha | | | | | | |
| | | melanocyte stim- | | | | | | |
| | | ulating hormone | | | | | | |
| | | receptor) (MC1R) | | | | | | |
| PCNA | 98 | proliferating cell | 232941 | SEQ ID No:146 | SEQ ID No:147 | SEQ ID No:339 | SEQ ID No:340 | SEQ ID No:341 |
| | | nuclear antigen | | | | | | |
| | | (PCNA) | | | | | | |
| DDT | 99 | D-dopachrome tau- | 132109 | SEQ ID No:148 | SEQ ID No:149 | SEQ ID No:88 | SEQ ID No:89 | SEQ ID No:90 |
| | | tomerase (DDT) | | | | | | |
| GRB2 | 100 | growth factor re- | 172152 | SEQ ID No:150 | SEQ ID No:151 | SEQ ID No:230 | SEQ ID No:231 | SEQ ID No:232 |
| | | ceptor-bound | | | | | | |
| | | protein 2 (GRB2) | | | | | | |
| AMFR | 101 | autocrine motility | 146280 | SEQ ID No:152 | SEQ ID No:153 | SEQ ID No:111 | SEQ ID No:112 | SEQ ID No:113 |
| | | factor receptor | | | | | | |
| | | (AMFR) | | | | | | |
| ITGB2 | 102 | integrin, beta 2 | 187822 | SEQ ID No:154 | | 0 | SEQ ID No:267 | SEQ ID No:268 |
| | | 2 (antigen CD18 | | | | | | |
| | | (p95), lymphocyte | | | | | | |
| | | function-ass- | | | | | | |
| | | ociated antigen 1; | | | | | | |
| | | macrophage antigen | | | | | | |
| | | 1 (mac-1) beta | | | | | | |
| | | subunit) (ITGB2) | | | | | | |
| JUND | 103 | jun D proto- | 175421 | SEQ ID No:155 | | SEQ ID No:233 | 0 | SEQ ID No:234 |
| | | oncogene (JUND) | | | | | | |
| NF45 | 104 | interleukin en- | 243907 | | SEQ ID No:156 | 0 | SEQ ID No:350 | SEQ ID No:351 |
| | | hancer binding | | | | | | |
| | | factor 2 (ILF2) (ex | | | | | | |
| | | NF45) | | | | | | |
| PPP4C | 105 | protein phosphatase | 114097 | SEQ ID No:157 | SEQ ID No:158 | SEQ ID No:32 | SEQ ID No:33 | SEQ ID No:34 |
| | | 4 (formerly X) | | | | | | |
| | | (PPP4C) | | | | | | |
| EMS1 | 106 | ATX1 (antioxidant | 149172 | SEQ ID No:159 | | SEQ ID No:123 | SEQ ID No:124 | SEQ ID No:125 |
| | | protein 1, yeast) | | | | | | |
| | | homolog 1 | | | | | | |
| | | (ATOX1) (ex | | | | | | |
| | | EMS1) | | | | | | |
| BCL2 | 107 | B-cell CLL/lymph- | 147002 | SEQ ID No:160 | SEQ ID No:161 | SEQ ID No:115 | SEQ ID No:116 | SEQ ID No:117 |
| | | oma 2 (BCL2), nu- | | | | | | |
| | | clear gene encoding | | | | | | |
| | | mitochondrial pro- | | | | | | |
| | | tein, transcript var- | | | | | | |
| | | iant alpha | | | | | | |
| MGST1 | 108 | protein phosphatase | 182610 | SEQ ID No:162 | SEQ ID No:163 | SEQ ID No:248 | 0 | SEQ ID No:249 |
| | | 1, catalytic sub- | | | | | | |
| | | unit, alpha iso- | | | | | | |
| | | form (PPP1CA) (ex | | | | | | |
| | | MGST1) | | | | | | |
| PDGFRB | 109 | platelet-derived | 158976 | | SEQ ID No:164 | 0 | SEQ ID No:208 | SEQ ID No:209 |
| | | growth factor re- | | | | | | |
| | | ceptor, beta poly- | | | | | | |
| | | peptide (PDGFRB) | | | | | | |
| ANXA11 | 110 | annexin A11 | 158892 | | SEQ ID No:165 | 0 | SEQ ID No:206 | SEQ ID No:207 |
| | | (ANXA11) | | | | | | |
| GPX1 | 111 | histocompatability | 159809 | | SEQ ID No:166 | 0 | SEQ ID No:212 | SEQ ID No:213 |
| | | class II antigen | | | | | | |
| | | gamma chain | | | | | | |
| | | (CD74) (ex GPX1 | | | | | | |
| | | Glutation S trans- | | | | | | |
| | | férase) | | | | | | |
| CFR-1 | 112 | Golgi apparatus pro- | 153974 | SEQ ID No:167 | SEQ ID No:168 | SEQ ID No:173 | SEQ ID No:174 | SEQ ID No:175 |
| | | tein 1 (GLG1) (ex | | | | | | |
| | | CFR-1) | | | | | | |
| BTF3L3 | 113 | basic transcription | 195889 | SEQ ID No:169 | | SEQ ID No:289 | 0 | SEQ ID No:290 |
| | | factor 3 (BTF3) | | | | | | |
| EST R55460 | 114 | EST R55460 | 154997 | | SEQ ID No:170 | 0 | SEQ ID No:185 | 0 |
| AKT2 | 115 | v-akt murine thy- | 182552 | SEQ ID No:171 | | SEQ ID No:253 | 0 | SEQ ID No:254 |
| | | moma viral onco- | | | | | | |
| | | gene homolog 2 | | | | | | |
| | | (ATK2) | | | | | | |
| CDKN1A | 116 | cyclin-dependent | 152524 | SEQ ID No:172 | SEQ ID No:173 | SEQ ID No:144 | SEQ ID No:145 | SEQ ID No:146 |
| | | kinase inhibitor | | | | | | |
| | | (CDKN1A) | | | | | | |
| PPP2CA | 117 | protein phosphatase | 54685 | SEQ ID No:174 | SEQ ID No:175 | 0 | SEQ ID No:183 | SEQ ID No:184 |
| | | 2 (formerly 2A), | | | | | | |
| | | catalytic subunit, | | | | | | |
| | | alpha isoform | | | | | | |
| | | (PPP2CA) | | | | | | |
| MDM2 | 118 | mouse double min- | 148052 | SEQ ID No:176 | | 0 | SEQ ID No:120 | SEQ ID No:121 |
| | | ute 2, human homo- | | | | | | |
| | | logy of; p53-binding | | | | | | |
| | | protein (MDM2), | | | | | | |
| | | transcript variant | | | | | | |
| | | MDM2 | | | | | | |
| TNFRSF6 | 119 | tumor necrosis | 151767 | SEQ ID No:177 | SEQ ID No:178 | SEQ ID No:141 | SEQ ID No:142 | SEQ ID No:143 |
| | | factor receptor | | | | | | |
| | | superfamily, mem- | | | | | | |
| | | ber 6 (TNFRSF6) | | | | | | |
| CNTFR | 120 | ciliary neurotrophic | 156431 | | SEQ ID No:179 | 0 | SEQ ID No:192 | SEQ ID No:193 |
| | | factor receptor | | | | | | |
| | | (CNTFR) | | | | | | |
| JUNB | 121 | jun B proto-onco- | 153213 | SEQ ID No:180 | SEQ ID No:181 | SEQ ID No:153 | SEQ ID No:154 | SEQ ID No:155 |
| | | gene (JUNB) | | | | | | |
| CCND1 | 122 | cyclin D1 (PRAD1: | 110022 | SEQ ID No:182 | | SEQ ID No:9 | 0 | SEQ ID No:10 |
| | | parathyroid | | | | | | |
| | | adenomatosis 1) | | | | | | |
| | | (CCND1) | | | | | | |
| TDPX1 | 123 | peroxiredoxin 2 | 208439 | SEQ ID No:183 | SEQ ID No:184 | SEQ ID No:314 | SEQ ID No:315 | SEQ ID No:316 |
| | | (PRDX2) (ex | | | | | | |
| | | TDPX1) | | | | | | |
| GRB7 | 124 | growth factor | 130323 | SEQ ID No:185 | SEQ ID No:186 | SEQ ID No:79 | SEQ ID No:80 | SEQ ID No:81 |
| | | receptor-bound pro- | | | | | | |
| | | tein 7 (GRB7) | | | | | | |
| RBBP7 | 125 | retinoblastoma-bind- | 210874 | SEQ ID No:187 | SEQ ID No:188 | SEQ ID No:319 | SEQ ID No:320 | SEQ ID No:321 |
| | | ing protein 7 | | | | | | |
| | | (RBBP7) | | | | | | |
| TIMP1 | 126 | tissue inhibitor of | 162246 | SEQ ID No:190 | SEQ ID No:223 | SEQ ID No:224 | SEQ ID No:225 | SEQ ID NO:189 |
| | | metalloproteinase 1 | | | | | | |
| | | (erythyroid po- | | | | | | |
| | | tentiating act- | | | | | | |
| | | ivity, collagen- | | | | | | |
| | | ase inhibitor) | | | | | | |
| | | (TIMP1) | | | | | | |
| YES1 | 127 | v-yes-1 Yamaguchi | 204634 | SEQ ID No:191 | | SEQ ID No:303 | 0 | SEQ ID No:304 |
| | | sarcoma viral onco- | | | | | | |
| | | gene homolog 1 | | | | | | |
| | | (YES1) | | | | | | |
| RNF5 | 128 | ring finger protein | 112098 | | SEQ ID No:192 | 0 | SEQ ID No:25 | SEQ ID No:26 |
| | | 5 (RNF5) | | | | | | |
| PRKCSH | 129 | protein kinase C | 187232 | | SEQ ID No:193 | 0 | SEQ ID No:263 | SEQ ID No:264 |
| | | substrate 80K-H | | | | | | |
| | | (PRKCSH) | | | | | | |
| CTSD | 130 | cathepsin D (lyso- | 149401 | SEQ ID No:194 | SEQ ID No:195 | SEQ ID No:126 | SEQ ID No:127 | SEQ ID No:128 |
| | | somal aspartyl pro- | | | | | | |
| | | tease) (CTSD) | | | | | | |
| NEO1 | 131 | neogenin (chicken) | 188380 | | SEQ ID No:196 | 0 | SEQ ID No:269 | SEQ ID No:270 |
| | | homolog 1 (NEO1) | | | | | | |
| GAPD-a | 132 | glyceraldehyde-3- | 152847 | SEQ ID No:197 | | SEQ ID No:150 | SEQ ID No:151 | SEQ ID No:152 |
| | | phosphatase dehy- | | | | | | |
| | | drogenase (GAPD) | | | | | | |
| ACTG1 | 133 | actin, gamma 1 | 182291 | SEQ ID No:198 | SEQ ID No:199 | SEQ ID No:242 | SEQ ID No:243 | SEQ ID No:244 |
| | | (ACTG1) | | | | | | |
| ITGA6 | 134 | integrin, alpha 6 | 182431 | SEQ ID No:200 | SEQ ID No:201 | SEQ ID No:245 | SEQ ID No:246 | SEQ ID No:247 |
| | | (ITGA6) | | | | | | |
| GAPD-b | 135 | glyceraldehyde-3- | 153607 | SEQ ID No:202 | SEQ ID No:203 | SEQ ID No:166 | SEQ ID No:167 | SEQ ID No:152 |
| | | phosphate dehydro- | | | | | | |
| | | genase (GAPD) | | | | | | |
| ETV5-b | 136 | ets variant gene 5 | 203394 | SEQ ID No:204 | SEQ ID No:205 | SEQ ID No:298 | SEQ ID No:299 | SEQ ID No:300 |
| | | (ets-related mole- | | | | | | |
| | | cule) (ETV5) | | | | | | |
| CDK4-b | 137 | cyclin-dependent | 195800 | SEQ ID No:206 | SEQ ID No:207 | SEQ ID No:286 | SEQ ID No:287 | SEQ ID No:288 |
| | | kinase 4 (CDK4) | | | | | | |
| FOS-b | 138 | v-fos FBJ murine | 363796 | SEQ ID No:208 | SEQ ID No:209 | SEQ ID No:404 | SEQ ID No:405 | SEQ ID No:318 |
| | | osteosarcoma viral | | | | | | |
| | | oncogene homo- | | | | | | |
| | | log (FOS) | | | | | | |
| HOXA5 | 139 | homebox protein | 300564 | SEQ ID No:210 | SEQ ID No:211 | SEQ ID No:382 | SEQ ID No:383 | SEQ ID No:384 |
| | | (HOX-1.3) (ex Hox | | | | | | |
| | | A5) | | | | | | |
| RELA | 140 | NF-kappa-B trans- | 122056 | SEQ ID No:212 | | SEQ ID No:42 | 0 | SEQ ID No:43 |
| | | cription factor p65 | | | | | | |
| | | DNA binding sub- | | | | | | |
| | | unit (ex RELa) | | | | | | |
| SUI1 | 141 | S100 calcium-bind- | 155345 | SEQ ID No:213 | SEQ ID No:214 | SEQ ID No:186 | 0 | 0 |
| | | ing protein A11 | | | | | | |
| | | (calgizzarin) | | | | | | |
| | | (S100A11) | | | | | | |
| ANG | 142 | angiogenin, ribonu- | 156720 | | SEQ ID No:215 | 0 | SEQ ID N:194 | SEQ ID No:195 |
| | | clease, RNase | | | | | | |
| | | A family, 5 | | | | | | |
| | | (ANG) | | | | | | |
| ITGA6 | 143 | integrin, alpha 6 | 182431 | SEQ ID No:216 | SEQ ID No:217 | SEQ ID No:245 | SEQ ID No:246 | SEQ ID No:247 |
| | | (ITGA6) | | | | | | |
| PRMT2 | 144 | HMT1 (hnRNP | 158038 | SEQ ID No:218 | SEQ ID No:219 | SEQ ID No:201 | SEQ ID No:202 | SEQ ID No:203 |
| | | methyltransfer- | | | | | | |
| | | ase, S. cerevis- | | | | | | |
| | | iae)-like 1 | | | | | | |
| | | (HRMTIL1) (ex | | | | | | |
| | | PRMT2) | | | | | | |
| EST R55460 | 145 | EST R55460 | 154997 | | SEQ ID No:220 | 0 | SEQ ID No:185 | 0 |
| GZMA | 146 | granzyme A (gran- | 356763 | SEQ ID No:221 | SEQ ID No:222 | SEQ ID No:402 | 0 | SEQ ID No:403 |
| | | zyme 1, cytotoxic | | | | | | |
| | | T-lymphocyte-ass- | | | | | | |
| | | ociated serine es- | | | | | | |
| | | terase 3) (GZMA) | | | | | | |
| SOX9 | 147 | SRY (sex-deter- | 323948 | SEQ ID No:223 | | SEQ ID No:394 | 0 | SEQ ID No:395 |
| | | mining region Y)- | | | | | | |
| | | box 9 (campomel- | | | | | | |
| | | ic dysplasia, auto- | | | | | | |
| | | somal sex-reversal) | | | | | | |
| | | (SOX9) | | | | | | |
| SRF | 148 | serum response | 321329 | | SEQ ID No:224 | SEQ ID No:391 | SEQ ID No:392 | SEQ ID No:393 |
| | | factor (c-fos serum | | | | | | |
| | | response element- | | | | | | |
| | | binding transcription | | | | | | |
| | | factor) (SRF) | | | | | | |
| EDNI | 149 | endothelial 1 | 153424 | SEQ ID No:225 | | #N/A | #N/A | #N/A |
| | | (EDN1) | | | | | | |
| PTPN6 | 150 | protein tyrosine | 66778 | SEQ ID No:226 | | #N/A | #N/A | #N/A |
| | | phosphatase, non- | | | | | | |
| | | receptor type 6 | | | | | | |
| | | (PTPN6) | | | | | | |
| TFAP4 | 151 | transcription factor | 159093 | SEQ ID No:227 | | 0 | SEQ ID No:210 | SEQ ID No:211 |
| | | AP-4 (activating | | | | | | |
| | | enhancer bind- | | | | | | |
| | | ing protein 4) | | | | | | |
| | | (TFAP4) | | | | | | |
| ELF1 | 152 | Human cis-acting- | 182007 | SEQ ID No:228 | | SEQ ID No:417 | 0 | 0 |
| | | sequence Elf-1 | | | | | | |
| CD2 | 153 | CD2 antigen (p50), | 120649 | SEQ ID No:229 | | SEQ ID No:431 | 0 | 0 |
| | | sheep red blood | | | | | | |
| | | cell receptor | | | | | | |
| | | (CD2) | | | | | | |
| CCND2 | 154 | cyclin D2 (CCND2) | 175256 | SEQ ID No:230 | | #N/A | #N/A | #N/A |
| IL3RA | 155 | interleukin 3 recep- | 183087 | SEQ ID No:231 | | SEQ ID No:440 | SEQ ID No:441 | 0 |
| | | tor (hIL-3Ra) | | | | | | |
| JUP | 156 | junction plakoglobin | 157958 | SEQ ID No:232 | | #N/A | #N/A | #N/A |
| | | (JUP) | | | | | | |
| RBL2 | 157 | retinoblastoma-like | 108571 | SEQ ID No:233 | | SEQ ID No:430 | 0 | 0 |
| | | 2 (p130) (RBL2) | | | | | | |
| HOXA4 | 158 | homeo box A4 | 110731 | SEQ ID No:234 | | SEQ ID No:20 | SEQ ID No:21 | 0 |
| | | (HOXA4) | | | | | | |
| ACY1 | 159 | aminoacylase | 160764 | SEQ ID No:235 | | SEQ ID No:435 | SEQ ID No:436 | 0 |
| | | (ACY1) | | | | | | |
| GADD45A | 160 | growth arrest and | 115176 | SEQ ID No:236 | | #N/A | #N/A | #N/a |
| | | DNA-damage-in- | | | | | | |
| | | ducible, alpha | | | | | | |
| | | (GADD45A) | | | | | | |
| nm23 | 161 | non-metastatic | 174388 | SEQ ID No:237 | | #N/A | #N/A | #N/A |
| | | cells 1, protein | | | | | | |
| | | (NM23A) express- | | | | | | |
| | | ed (NME1) | | | | | | |
| BBC1 | 162 | ribosomal protein | 178317 | SEQ ID No:238 | | #N/A | #N/A | #N/A |
| | | L13 (RPL13) (ex | | | | | | |
| | | BBC1) | | | | | | |
| VEGFB | 163 | vascular endothe- | 162499 | SEQ ID No:239 | | #N/A | #N/A | #N/A |
| | | lial growth factor B | | | | | | |
| | | (VEGFB) | | | | | | |
| LAMR1 | 164 | laminin receptor 1 | 199837 | SEQ ID No:240 | | #N/A | #N/A | #N/A |
| | | (67kD, ribosomal | | | | | | |
| | | protein SA) | | | | | | |
| | | (LAMR1) | | | | | | |
| IL2RB | 165 | interleukin 2 re- | 139073 | SEQ ID No:241 | SEQ ID No:242 | SEQ ID No:97 | SEQ ID No:98 | SEQ ID No:99 |
| | | ceptor, beta | | | | | | |
| | | (IL2RB) | | | | | | |
| DES | 166 | desmin | 153854 | SEQ ID No:243 | | SEQ ID No:168 | SEQ ID No:169 | SEQ ID No:170 |
| PRL | 167 | prolactin | 133738 | SEQ ID No:244 | | SEQ ID No:91 | SEQ ID No:92 | SEQ ID No:93 |
| CSH1 | 168 | Chorionic soma- | 133891 | | SEQ ID No:245 | SEQ ID No:432 | 0 | 0 |
| | | tomammotropin hor- | | | | | | |
| | | mone 1 (placental | | | | | | |
| | | lactogen) = LAC- | | | | | | |
| | | TOGEN Precursor | | | | | | |
| TEK | 169 | tyrosine proteine | 151501 | SEQ ID No:246 | SEQ ID No:247 | SEQ ID No:138 | SEQ ID No:139 | SEQ ID No:140 |
| | | kinase receptor | | | | | | |
| Nrg1 | 170 | neuregulin 1 (EST | 155716 | SEQ ID No:248 | SEQ ID No:249 | SEQ ID No:189 | SEQ ID No:190 | SEQ ID No:191 |
| | | R72075) | | | | | | |
| PLAT | rien | pas dEST ni | 160149 | | | SEQ ID No:433 | SEQ ID No:434 | 0 |
| | | mRNA | | | | | | |
| EST | rien | | image ? | | | | | |
| AW184517 | | | | | | | | |

[0110] Tables 5 hereunder displays subpopulations of polynucleotide sequences interesting to distinguish a person without cancer from a cancer patient.

TABLE 5

| Gene | | | | | |
|---|---|---|---|---|---|
| symbol | No | Name | Seq3′ | Seq5′ | Ref |
| HRB | 1 | hiv-1 rev binding protein | SEQ ID | | SEQ ID |
| | | | No:1 | | No:2 |
| EST T81919 | 4 | ests, weakly similar to alu7_human alu subfamily | SEQ ID | SEQ ID | |
| | | sq sequence contamination warning entry [h. sapines] | No:7 | No:8 | |
| ENPP2 | 18 | ectonucleotide pyrophosphatase/phosphodiesterase 2 | SEQ ID | SEQ ID | SEQ ID |
| | | (autotaxin) | No:39 | No:40 | No:41 |
| TNXB | 21 | tenascin xb | | SEQ ID | SEQ ID |
| | | | | No:46 | No:47 |
| APC | 24 | adenomatosis polyposis coli | SEQ ID | SEQ ID | SEQ ID |
| | | | No:54 | No:55 | NO:56 |
| GATA3 | 32 | gata-binding protein 3 | SEQ ID | SEQ ID | SEQ ID |
| | | | No:76 | No:77 | No:78 |
| PRL | 38 | prolactin | SEQ ID | SEQ ID | SEQ ID |
| | | | No:91 | No:92 | No:93 |
| BCL2 | 48 | b-cell cll/lymphoma 2 | SEQ ID | SEQ ID | SEQ ID |
| | | | No:115 | No:116 | No:117 |
| CTSD | 53 | cathepsin d (lysosomal aspartyl protease) | SEQ ID | SEQ ID | SEQ ID |
| | | | No:126 | No:127 | No:128 |
| TEK | 58 | tek tyrosine kinase, endothelial (venous | SEQ ID | SEQ ID | SEQ ID |
| | | malformations, multiple cutaneous and mucosal) | No:138 | No:139 | No:140 |
| TNFRSF6 | 59 | tumor necrosis factor receptor superfamily, member | SEQ ID | SEQ ID | SEQ ID |
| | | 6 | No:141 | No:142 | No:143 |
| PLA2G2A | 61 | phospholipase a2, group iia (platelets, synovial | SEQ ID | SEQ ID | SEQ ID |
| | | fluid | No:147 | No:148 | No:149 |
| CRABP2 | 64 | cellular retinoic acid-binding protein 2 | SEQ ID | SEQ ID | SEQ ID |
| | | | No:156 | No:157 | No:158 |
| RIL | 66 | lim domain protein | SEQ ID | SEQ ID | SEQ ID |
| | | | | No:162 | No:163 |
| DES | 69 | desmin | SEQ ID | SEQ ID | SEQ ID |
| | | | No:168 | No:169 | No:170 |
| GZMB | 73 | granzyme b (granzyme 2, cytotoxic t-lymphocyte- | SEQ ID | | SEQ ID |
| | | associated serine esterase 1) | No:178 | | No:179 |
| ETV4 | 85 | ets variant gene 4 (e1a enhancer-binding protein, | SEQ ID | SEQ ID | |
| | | e1af) | No:204 | No:205 | |
| WBSCR14 | 88 | williams-beuren syndrome chromosome region 14 | | SEQ ID | SEQ ID |
| | | | | No:210 | No:211 |
| THBS1 | 91 | thrombospondin 1 | SEQ ID | | SEQ ID |
| | | | No:216 | | No:217 |
| GRB2 | 97 | growth factor receptor-bound protein 2 | SEQ ID | SEQ ID | SEQ ID |
| | | | No:230 | No:231 | No:232 |
| RAD9 | 104 | rad9 (s. pombe) homolog | SEQ ID | | SEQ ID |
| | | | No:248 | | No:249 |
| ATF3 | 105 | activating transcription factor 3 | SEQ ID | SEQ ID | SEQ ID |
| | | | No:250 | No:251 | No:252 |
| DTR | 112 | diphtheria receptor (heparin-binding epidermal | | SEQ ID | SEQ ID |
| | | growth factor-like growth factor) | | No:265 | No:266 |
| ITGB2 | 113 | integrin, beta 2 (antigen cd18 (p95), lymphocyte | | SEQ ID | SEQ ID |
| | | function-associated antigen 1, macrophage entigen 1 | | No:267 | No:268 |
| | | (mac-1) beta subunit) | | | |
| POU2F2 | 115 | pou domain, class 2, transcription factor 2 | SEQ ID | | SEQ ID |
| | | | No:271 | | No:272 |
| MYBL2 | 131 | v-myb avian myeoblastosis viral oncogene | SEQ ID | SEQ ID | SEQ ID |
| | | homolog-like 2 | No:308 | No:309 | No:310 |
| TGFBR3 | 132 | transforming growth factor, beta receptor iii | SEQ ID | SEQ ID | SEQ ID |
| | | (betaglycan, 300kd) | No:311 | No:312 | No:313 |
| FOS | 134 | v-fos fbj murine osteosarcoma viral oncogene | | SEQ ID | SEQ ID |
| | | homolog | | No:317 | No:318 |
| ABCC5 | 137 | atp-binding cassette, sub-family c (cftr/mrp), | | SEQ ID | SEQ ID |
| | | member 5 | | No:324 | No:325 |
| MMP11 | 145 | matrix metalloproteinase 11 (stromelysin 3) | SEQ ID | | SEQ ID |
| | | | No:345 | | No:346 |
| ILF2 | 147 | interleukin enhancer binding factor 2, 45kd | | SEQ ID | SEQ ID |
| | | | | No:350 | No:351 |
| ETV5 | 155 | ets variant gene 5 (ets-related molecule) | SEQ ID | SEQ ID | SEQ ID |
| | | | No:368 | No:369 | No:300 |
| RELB | 175 | v-rel avian reticuloendotheliosis viral oncogene | SEQ ID | SEQ ID | SEQ ID |
| | | homolog b (nuclear factor of kappa light polypeptide | No:417 | No:418 | No:419 |
| | | gene enhancer in b-cells 3) | | | |
| EST T80406 | 180 | similar to SP:S36648 S36648 RB2/P130 PROTEIN | SEQ ID | | |
| | | | No:430 | | |
| EST Y95640 | 181 | similar to gb:M16336 T-CELL SURFACE | SEQ ID | | |
| | | ANTIGEN CD2 | No:431 | | |
| EST R28523 | 182 | similar to placental lactogen (CSH1) | SEQ ID | | |
| | | | No:432 | | |
| EST H28056 | 185 | Homo sapines E74-like factor 1 (ets domain | SEQ ID | | |
| | | transcription factor) (ELF1) | No:437 | | |
| ESTs H42957 & | 187 | Human interleukin 3 receptor (hIL-3Ra) | SEQ ID | SEQ ID | |
| H42888 | | | No:440 | No:441 | |

[0111] Tables 5A and 5B hereunder displays two subpopulations corresponding to the 5 top overexpressed and to the 5 top underexpressed polynucleotide sequences particularly interesting to distinguish a person without cancer from a cancer patient.

TABLE 5A
overexpressed genes:top 5

| Gene | | | | | |
|---|---|---|---|---|---|
| symbol | No | Name | Seq3′ | Seq5′ | Ref |
| GATA3 | 32 | gata-binding protein 3 | SEQ ID | SEQ ID | SEQ ID |
| | | | No:76 | No:77 | No:78 |
| GZMB | 73 | granzyme b (granzyme 2, cytotoxic t- | SEQ ID | | SEQ ID |
| | | lymphocyte-associated serine esterase 1) | No:178 | | No:179 |
| MYBL2 | 131 | v-myb avian myeloblastosis viral oncogene | SEQ ID | SEQ ID | SEQ ID |
| | | homolog-like 2 | No:308 | No:309 | No:310 |
| MMP11 | 145 | matrix metallopropteinase 11 (stromelysin 3) | SEQ ID | | SEQ ID |
| | | | No:345 | | No:346 |
| EST | 181 | similar to gb:M16336 T-CELL SURFACE | SEQ ID | | |
| T95640 | | ANTIGEN CD2 | No:431 | | |

[0112] TABLE 5B
underexpressed genes:top 5

| Gene | | | | | |
|---|---|---|---|---|---|
| symbol | No | Name | Seq3′ | Seq5′ | Ref |
| PRL | 38 | prolactin | SEQ ID | SEQ ID | SEQ ID |
| | | | No:91 | No:92 | No:93 |
| TEK | 58 | tek tyrosine kinase, endothelial (venous | SEQ ID | SEQ ID | SEQ ID |
| | | malformations, multiple cutaneous and mucosal) | No:138 | No:139 | No:140 |
| PLA2GA | 612 | phospholipase a2, group iia (platelets, synovial fluid) | SEQ ID | SEQ ID | SEQ ID |
| | | | No:147 | No:148 | No:149 |
| DES | 69 | desmin | SEQ ID | SEQ ID | SEQ ID |
| | | | No:168 | No:169 | No:170 |
| EST R28523 | 182 | similar to placental lactogen (CSH1) | SEQ ID | | |
| | | | No:432 | | |

[0113] Table 6 hereunder relates to subpopulations of polynucleotide sequences interesting to detect hormone-sensitive tumors allowing distinction between ER+ and ER-samples.

TABLE 6

| Gene | | | | | |
|---|---|---|---|---|---|
| symbol | No | Name | Seq3′ | Seq5′ | Ref |
| SOX4 | 11 | sry (sex determining region y)-box 4 | SEQ ID | SEQ ID | SEQ ID |
| | | | No:22 | No:23 | No:24 |
| IGF2 | 26 | insulin-like growth factor 2 (somatomedian a) | SEQ ID | SEQ ID | SEQ ID |
| | | | No:59 | No:60 | No:61 |
| GATA3 | 32 | gata-binding protein 3 | SEQ ID | SEQ ID | SEQ ID |
| | | | No:76 | No:77 | No:78 |
| TOP2B | 34 | topoisomerase (dna) ii beta (180kd) | | SEQ ID | SEQ ID |
| | | | | No:82 | No:83 |
| IL2RB | 40 | interleukin 2 receptor, beta | SEQ ID | SEQ ID | SEQ ID |
| | | | No:97 | No:98 | No:99 |
| EGFR | 57 | epidermal growth factor receptor (avian | SEQ ID | SEQ ID | SEQ ID |
| | | erythroblastic leukemia viral (v-erb-b) oncogene | No:135 | No:136 | No:137 |
| | | homolog) | | | |
| CRABP2 | 64 | cellular retinoic acid-binding protein 2 | SEQ ID | SEQ ID | SEQ ID |
| | | | No:156 | No:157 | No:158 |
| S100B | 107 | s100 calcium-binding protein, beta (neural) | | SEQ ID | SEQ ID |
| | | | | No:255 | No:256 |
| IL2RG | 119 | interleukin 2 receptor, gamma (severe combined | SEQ ID | SEQ ID | SEQ ID |
| | | immunodeficiency) | No:279 | No:280 | No:281 |
| KIAA1075 | 136 | kiaa 1075 protein | SEQ ID | SEQ ID | |
| | | | No:322 | No:323 | |
| MST1 | 140 | macrophage stimulating 1 (hepatocyte growth factor- | SEQ ID | SEQ ID | SEQ ID |
| | | like) | No:331 | No:332 | No:333 |
| GSTP1 | 141 | glutathione s-transferase pi | SEQ ID | SEQ ID | SEQ ID |
| | | | No:334 | No:335 | No:336 |
| MMP11 | 145 | matrix metalloproteinase 11 (stromelysin 3) | SEQ ID | | SEQ ID |
| | | | No:345 | | No:346 |
| FLJ11307 | 148 | hypothetical protein flj11307 | SEQ ID | | SEQ ID |
| | | | No:352 | | No:353 |
| MYB | 149 | v-myb avian myeloblastosis viral oncogene homolog | | SEQ ID | SEQ ID |
| | | | | No:354 | No:355 |
| XBP1 | 162 | x-box binding protein 1 | SEQ ID | SEQ ID | SEQ ID |
| | | | No:385 | No:386 | No:387 |
| SOX9 | 165 | sry (sex dtermining region y)-boc 9 (campomelic | SEQ ID | | SEQ ID |
| | | dysplasia, autosomal sex-reversal) | No:394 | | No:395 |
| GZMA | 169 | granzyme a (granzyme 1, cytotoxic t-lymphocyte- | SEQ ID | | SEQ ID |
| | | associated serine esterase 3) | No:402 | | No:403 |
| CD3G | 174 | cd3g antigen, gamma polypeptide (tit3 complex) | SEQ ID | SEQ ID | SEQ ID |
| | | | No:414 | No:415 | No:416 |
| EST | 188 | Human tumor protein p53 (Li-Fraumeni syndrome) | SEQ ID | | |
| H57912 | | (TP53) | No:442 | | |

[0114] Tables 6A and 6B hereunder relate to two subpopulations of polynucleotide sequences particularly interesting to detect hormone-sensitive tumors allowing distinction between ER+ and ER− samples

TABLE 6A
overexpressed genes:top 5
ER +/ER −

| Gene | CL | | | | |
|---|---|---|---|---|---|
| symbol | No | Name | Seq3′ | Seq5′ | Ref |
| GATA3 | 32 | gata-binding protein 3 | SEQ ID | SEQ ID | SEQ ID |
| | | | No:76 | No:77 | No:78 |
| KIAA1075 | 136 | kiaa 1075 protein | SEQ ID | SEQ ID | |
| | | | No:322 | No:323 | |
| MMP11 | 145 | matrix metalloproteinase 11 | SEQ ID | | SEQ ID |
| | | (stromelysin 3) | No:345 | | No:346 |
| MYB | 149 | v-myb avian myeloblastosis viral | | SEQ ID | SEQ ID |
| | | oncogene homolog | | No:354 | No:355 |
| GZMA | 169 | granzyme a (granzyme 1, yutotoxic t- | SEQ ID | | SEQ ID |
| | | lymphocyte-associated serine esterase 3) | No:402 | | No:403 |

[0115] TABLE 6B
underexpressed genes:top 5

| Gene | | | | | |
|---|---|---|---|---|---|
| symbol | No | Name | Seq3′ | Seq5′ | Ref |
| SOX4 | 11 | sry (sex determining region y)-box 4 | SEQ ID | SEQ ID | SEQ ID |
| | | | No:22 | No:23 | No:24 |
| IL2RB | 40 | interleukin 2 receptor, beta | SEQ ID | SEQ ID | SEQ ID |
| | | | No:97 | No:98 | No:99 |
| EGFR | 57 | epidermal growth factor receptor (avian | SEQ ID | SEQ ID | SEQ ID |
| | | eryhtroblastic leukemia viral (v-erb-b) | No:135 | No:136 | No:137 |
| | | oncogene homolog) | | | |
| IL2RG | 119 | interleukin 2 receptor, gamma (severe | SEQ ID | SEQ ID | SEQ ID |
| | | combined immunodeficiency) | No:279 | No:280 | No:281 |
| CD3G | 174 | cd3g antigen, gamma polypeptide (tit3 | SEQ ID | SEQ ID | SEQ ID |
| | | complex) | No:414 | No:415 | No:416 |

[0116] Tables 7 hereunder relates to subpopulations of polynucleotide sequences interesting to distinguish tumors in which a lymph node has been invaded by a tumor cell from tumors in which a lymph node has not been so invaded.

TABLE 7

| Gene | CL | | | | |
|---|---|---|---|---|---|
| symbol | No | Name | Seq3′ | Seq5′ | Ref |
| EST T89980 | 8 | ests | SEQ ID | | |
| | | | No:16 | | |
| SOX4 | 11 | sry (sex determining region y)-box 4 | SEQ ID | SEQ ID | SEQ ID |
| | | | No:22 | No:23 | No:24 |
| ENPP2 | 18 | ectonucleotide | SEQ ID | SEQ ID | SEQ ID |
| | | pyrophosphatase/phosphodiesterase 2 | No:39 | No:40 | No:41 |
| | | (autotoxin) | | | |
| MUC1 | 25 | mucin 1, transmembrane | | SEQ ID | SEQ ID |
| | | | | No:57 | No:58 |
| GATA3 | 32 | gata-binding protein 3 | SEQ ID | SEQ ID | SEQ ID |
| | | | No:76 | No:77 | No:78 |
| TOP2B | 34 | topoisomerase (dna) it beta (180kd) | | SEQ ID | SEQ ID |
| | | | | No:82 | No:83 |
| IL2RB | 40 | interleukin 2 receptor, beta | SEQ ID | SEQ ID | SEQ ID |
| | | | No:97 | No:98 | No:99 |
| ERBB2 | 49 | v-erb-b2 avian erythroblastic | | SEQ ID | SEQ ID |
| | | leukemia viral oncogene homolog 2 | | No:118 | No:119 |
| | | (neuro/glioblastoma derived oncogene | | | |
| | | homolog) | | | |
| EGFR | 57 | epidermal growth factor receptor (avian | SEQ ID | SEQ ID | SEQ ID |
| | | erythroblastic leukemia viral (v-erb-b) | No:135 | No:136 | No:137 |
| | | oncogene homolog) | | | |
| THBS1 | 91 | thrombospondin 1 | SEQ ID | | SEQ ID |
| | | | No:216 | | No:217 |
| PPP2R2C | 100 | protein phosphatase 2 (formerly 2a), | SEQ ID | SEQ ID | |
| | | regulatory subunit b (pr 52), gamma | No:238 | No:239 | |
| | | isoform | | | |
| ATF3 | 105 | activating transcription factor 3 | SEQ ID | SEQ ID | SEQ ID |
| | | | No:250 | No:251 | No:252 |
| KIAA1075 | 136 | kiaa 1075 protein | SEQ ID | SEQ ID | |
| | | | No:322 | No:323 | |
| CDH1 | 138 | cadherin 1, type 1, e-cadherin (epithelial) | SEQ ID | SEQ ID | SEQ ID |
| | | | No:326 | No:327 | No:328 |
| ZNF144 | 139 | zinc finger protein 144 (mel-18) | | SEQ ID | SEQ ID |
| | | | | No:329 | No:330 |
| GSTP1 | 141 | glutathione s-transferase pi | SEQ ID | SEQ ID | SEQ ID |
| | | | No:334 | No:335 | No:336 |
| CD44 | 158 | cd44 antigen (homing function and indian | SEQ ID | SEQ ID | SEQ ID |
| | | blood group system) | No:374 | No:375 | No:376 |
| GZMA | 169 | granzyme a (granzyme 1, cytotoxic t-lym- | SEQ ID | | SEQ ID |
| | | phocyte-associated serine esterase 3) | No:402 | | No:403 |
| EST T80406 | 180 | similar to SP;S36648 S36648 RB2/P130 | SEQ ID | | |
| | | PROTEIN | No:430 | | |
| ESTs H30141 & | 186 | Homo sapiens selectin P | SEQ ID | SEQ ID | |
| H27466 | | | No:438 | No:439 | |

[0117] Tables 7A and 7B hereunder relate to two subpopulations of polynucleotide sequences particularly interesting to distinguish tumors in which a lymph node has been invaded by a tumor cell from tumors in which a lymph node has not been so invaded.

TABLE 7A
Overexpressed genes:top 5

| Gene | | | | | |
|---|---|---|---|---|---|
| symbol | No | Name | Seq3′ | Seq5′ | Ref |
| ENPP2 | 18 | ectonucleotide | SEQ ID | SEQ ID | SEQ ID |
| | | pyrophosphatase/phosphodiesterase 2 | No:39 | No:40 | No:41 |
| | | (autotaxin) | | | |
| GATA3 | 32 | gata-binding protein 3 | SEQ ID | SEQ ID | SEQ ID |
| | | | No:76 | No:77 | No:78 |
| EGFR | 57 | epidermal growth factor receptor (avian | SEQ ID | SEQ ID | SEQ ID |
| | | erythroblastic leukemia viral (v-erb-b) | No:135 | No:136 | No:137 |
| | | oncogene homolog) | | | |
| THBS1 | 91 | thrombospondin 1 | SEQ ID | | SEQ ID |
| | | | No:216 | | No:217 |
| ATF3 | 105 | activating transcription factor 3 | SEQ ID | SEQ ID | SEQ ID |
| | | | No:250 | No:251 | No:252 |

[0118] TABLE 7B
Underexpressed genes: top 5

| Gene | | | | | |
|---|---|---|---|---|---|
| symbol | No | Name | Seq 3′ | Seq 5′ | Ref |
| SOX4 | 11 | sry (sex determining region y)-box 4 | SEQ ID | SEQ ID | SEQ ID |
| | | | No: 22 | No: 23 | No: 24 |
| IL2RB | 40 | interleukin 2 receptor, beta | SEQ ID | SEQ ID | SEQ ID |
| | | | No: 97 | No: 98 | No: 99 |
| ERBB2 | 49 | v-erb-b2 avian erythroblastic leukemia | | SEQ ID | SEQ ID |
| | | viral oncogene homolog 2 | | No: 118 | No: 119 |
| | | (neuro/glioblastoma derived oncogene | | | |
| | | homolog) | | | |
| PPP2R2C | 100 | protein phosphatase 2 (formerly 2a), | SEQ ID | SEQ ID | |
| | | regulatory subunit b (pr 52), gamma | No: 238 | No: 239 | |
| | | isoform | | | |
| GSTP1 | 141 | glutathione s-transferase pi | SEQ ID | SEQ ID | SEQ ID |
| | | | No: 334 | No: 335 | No:336 |

[0119] Table 8 hereunder relates to subpopulations of polynucleotide sequences particularly interesting to distinguish tumors sensitive to anthracycline from tumors insensitive to anthracycline.

TABLE 8
A1/A2

| Gene | | | | | |
|---|---|---|---|---|---|
| symbol | No | Name | Seq 3′ | Seq 5′ | Ref |
| SOX4 | 11 | sry (sex determining region y)-box | SEQ ID | SEQ ID | SEQ ID |
| | | | No: 22 | No: 23 | No: 24 |
| CSF1 | 22 | colony stimulating factor 1 (macrophage) | SEQ ID | SEQ ID | SEQ ID |
| | | | No: 48 | No: 49 | No: 50 |
| VIL2 | 23 | villin 2 (ezrin) | SEQ ID | SEQ ID | SEQ ID |
| | | | No: 51 | No: 52 | No: 53 |
| IGF2 | 26 | insulin-like growth factor 2 (somatomedin a) | SEQ ID | SEQ ID | SEQ ID |
| | | | No: 59 | No: 60 | No: 61 |
| KIAA0427 | 28 | kiaa0427 gene product | SEQ ID | SEQ ID | SEQ ID |
| | | | No: 65 | No: 66 | No: 67 |
| MYC | 31 | v-myc avian myelocytomatosis viral oncogene | SEQ ID | SEQ ID | SEQ ID |
| | | homolog | No: 73 | No: 74 | No: 75 |
| GATA3 | 32 | gata-binding protein 3 | SEQ ID | SEQ ID | SEQ ID |
| | | | No: 76 | No: 77 | No: 78 |
| TOP2B | 34 | topoisomerase (dna) ii beta (180 kd) | | SEQ ID | SEQ ID |
| | | | | No: 82 | No: 83 |
| ERBB2 | 49 | v-erb-b2 avian erythroblastic leukemia viral | | SEQ ID | SEQ ID |
| | | oncogene homolog 2 (neuro/glioblastoma | | No: 118 | No: 119 |
| | | derived oncogene homolog) | | | |
| EGFR | 57 | epidermal growth factor receptor (avian | SEQ ID | SEQ ID | SEQ ID |
| | | erythroblastic leukemia viral (v-erb-b) | No: 135 | No: 136 | No: 137 |
| | | oncogene homolog) | | | |
| CRABP2 | 64 | cellular retinoic acid-binding protein 2 | SEQ ID | SEQ ID | SEQ ID |
| | | | No: 156 | No: 157 | No: 158 |
| GZMB | 73 | granzyme b (granzyme 2, cytotoxic t- | SEQ ID | | SEQ ID |
| | | lymphocyte-associated serine esterase 1) | No: 178 | | No: 179 |
| IGKC | 77 | immunoglobulin kappa constant | SEQ ID | | |
| | | | No: 186 | | |
| ANG | 81 | angiogenin, ribonuclease, rnase a family, 5 | SEQ ID | SEQ ID | |
| | | | No: 194 | No: 195 | |
| EFNA1 | 95 | ephrin-al | | SEQ ID | SEQ ID |
| | | | | No: 226 | No: 227 |
| MYBL2 | 131 | v-myb avian myeloblastosis viral oncogene | SEQ ID | SEQ ID | SEQ ID |
| | | homolog-like 2 | No: 308 | No: 309 | No: 310 |
| CDH1 | 138 | cadherin 1, type 1, e-cadherin (epithelial) | SEQ ID | SEQ ID | SEQ ID |
| | | | No: 326 | No: 327 | No: 328 |
| MST1 | 140 | macrophage stimulating 1 (hepatocyte growth | SEQ ID | SEQ ID | SEQ ID |
| | | factor-like) | No: 331 | No: 332 | No: 333 |
| MYB | 149 | v-myb avian myeloblastosis viral oncogene | | SEQ ID | SEQ ID |
| | | homolog | | No: 354 | No: 355 |
| XBP1 | 162 | x-box binding protein 1 | SEQ ID | SEQ ID | SEQ ID |
| | | | No: 385 | No: 386 | No: 387 |
| SRF | 164 | serum response factor (c-fos serum response | SEQ ID | SEQ ID | SEQ ID |
| | | element-binding transcription factor) | No: 391 | No: 392 | No: 393 |
| SOX9 | 165 | sry (sex determining region y)-box 9 | SEQ ID | | SEQ ID |
| | | (campomelic dysplasia, autosomal sex-reversal) | No: 394 | | No: 395 |
| ESTs H21879 | 183 | Homo sapiens plasminogen activator (PLAT) | SEQ ID | SEQ ID | |
| & H21880 | | | No: 433 | No: 434 | |

[0120] Tables 8A and 8B hereunder relate to two subpopulations of polynucleotide sequences particularly interesting to distinguish tumors sensitive to anthracycline from tumors insensitive to anthracycline.

TABLE 8A
Overexpressed genes: top 5

| Gene | | | | | |
|---|---|---|---|---|---|
| symbol | No | Name | Seq 3′ | Seq 5′ | Ref |
| GATA3 | 32 | gata-binding protein 3 | SEQ ID | SEQ ID | SEQ ID |
| | | | No: 76 | No: 77 | No: 78 |
| KIAA1075 | 136 | kiaa1075 protein | SEQ ID | SEQ ID | |
| | | | No: 322 | No: 323 | |
| MMP11 | 145 | matrix metalloproteinase 11 | SEQ ID | | SEQ ID |
| | | (stromelysin 3) | No: 345 | | No: 346 |
| MYB | 149 | v-myb avian myeloblastosis viral | | SEQ ID | SEQ ID |
| | | oncogene homolog | | No: 354 | No: 355 |
| GZMA | 169 | Granzyme a (granzyme 1, cytotoxic t- | SEQ ID | | SEQ ID |
| | | lymphocyte-associated serine esterase 3) | No: 402 | | No: 403 |

[0121] TABLE 8B
underexpressed genes: top 5

| Gene | | | | | |
|---|---|---|---|---|---|
| symbol | No | Name | Seq 3′ | Seq 5′ | Ref |
| SOX4 | 11 | sry (sex determining region y)-box 4 | SEQ ID | SEQ ID | SEQ ID |
| | | | No: 22 | No: 23 | No: 24 |
| IL2RB | 40 | interleukin 2 receptor, beta | SEQ ID | SEQ ID | SEQ ID |
| | | | No: 97 | No: 98 | No: 99 |
| EGFR | 57 | epidermal growth factor receptor (avian | SEQ ID | SEQ ID | SEQ ID |
| | | erythroblastic leukemia viral (v-erb-b) | No: 135 | No: 136 | No: 137 |
| | | oncogene homolog) | | | |
| IL2RG | 119 | interleukin 2 receptor, gamma (severe | SEQ ID | SEQ ID | SEQ ID |
| | | combined immunodeficiency) | No: 279 | No: 280 | No: 281 |
| CD3G | 174 | cd3g antigen, gamma polypeptide (tit3 | SEQ ID | SEQ ID | SEQ ID |
| | | complex) | No: 414 | No: 415 | No:416 |

[0122] Tables 9, 9A and 9B hereunder relate to subpopulations of polynucleotide sequences particularly interesting in classifying good and poor prognosis primary breast tumors.

TABLE 9

| Gene | SET | | | | |
|---|---|---|---|---|---|
| symbol | No | Name | Seq 3′ | Seq 5′ | Ref |
| CTSB | 14 | cathepsin b | | SEQ ID | SEQ ID |
| | | | | No: 30 | No: 31 |
| VIL2 | 23 | villin 2 (ezrin) | SEQ ID | SEQ ID | SEQ ID |
| | | | No: 51 | No: 52 | No: 53 |
| MUC1 | 25 | mucin 1, transmembrane | | SEQ ID | SEQ ID |
| | | | | No: 57 | No: 58 |
| EMR1 | 27 | egf-like module containing, mucin-like, | SEQ ID | SEQ ID | SEQ ID |
| | | hormone receptor-like sequence 1 | No: 62 | No: 63 | No: 64 |
| KIAA0427 | 28 | kiaa0427 gene product | SEQ ID | SEQ ID | SEQ ID |
| | | | No: 65 | No: 66 | No: 67 |
| GATA3 | 32 | gata-binding protein 3 | SEQ ID | SEQ ID | SEQ ID |
| | | | No: 76 | No: 77 | No: 78 |
| PRLR | 39 | prolactin receptor | SEQ ID | SEQ ID | SEQ ID |
| | | | No: 94 | No: 95 | No: 96 |
| GATA3 | 41 | gata-binding protein 3 | SEQ ID | SEQ ID | SEQ ID |
| | | | No: 100 | No: 101 | No: 78 |
| TC21 | 44 | oncogene tc21 | SEQ ID | SEQ ID | SEQ ID |
| | | | No: 106 | No: 107 | No: 108 |
| BCL2 | 48 | b-cell cll/lymphoma 2 | SEQ ID | SEQ ID | SEQ ID |
| | | | No: 115 | No: 116 | No: 117 |
| GATA3 | 51 | gata-binding protein 3 | SEQ ID | | SEQ ID |
| | | | No: 122 | | No: 78 |
| CRABP2 | 64 | cellular retinoic acid-binding protein 2 | SEQ ID | SEQ ID | SEQ ID |
| | | | No: 156 | No: 157 | No: 158 |
| ANG | 81 | angiogenin, ribonuclease, mase a | | SEQ ID | SEQ ID |
| | | family, 5 | | No: 194 | No: 195 |
| EGF | 83 | epidermal growth factor (beta- | SEQ ID | | SEQ ID |
| | | urogastrone) | No: 199 | | No: 200 |
| THBS1 | 91 | thrombospondin 1 | SEQ ID | | SEQ ID |
| | | | No: 216 | | No: 217 |
| EDNRA | 96 | endothelin receptor type a | SEQ ID | | SEQ ID |
| | | | No: 228 | | No: 229 |
| SMARCA2 | 99 | swi/snf related, matrix associated, actin | SEQ ID | SEQ ID | SEQ ID |
| | | dependent regulator of chromatin, | No: 235 | No: 236 | No: 237 |
| | | subfamily a, member 2 | | | |
| ABCB1 | 108 | atp-binding cassette, sub-family b | SEQ ID | | SEQ ID |
| | | (mdr/tap), member 1 | No: 257 | | No: 258 |
| EGF | 110 | epidermal growth factor (beta- | SEQ ID | | SEQ ID |
| | | urogastrone) | No: 262 | | No: 200 |
| BIRC4 | 116 | baculoviral iap repeat-containing 4 | SEQ ID | | SEQ ID |
| | | | No: 273 | | No: 274 |
| DAP3 | 117 | death associated protein 3 | SEQ ID | | SEQ ID |
| | | | No: 275 | | No: 276 |
| GNRH1 | 118 | gonadotropin-releasing hormone 1 | | SEQ ID | SEQ ID |
| | | (leutinizing-releasing hormone) | | No: 277 | No: 278 |
| DAP3 | 120 | death associated protein 3 | SEQ ID | SEQ ID | SEQ ID |
| | | | No: 282 | No: 283 | No: 276 |
| EST R97218 | 126 | ests, highly similar to tvhume | SEQ ID | SEQ ID | |
| | | hepatocyte growth factor receptor | No: 296 | No: 297 | |
| | | precursor [h. sapiens] | | | |
| BCL2 | 142 | b-cell cll/lymphoma 2 | SEQ ID | SEQ ID | SEQ ID |
| | | | No: 337 | No: 338 | No: 117 |
| BS69 | 144 | adenovirus 5 ela binding protein | SEQ ID | SEQ ID | SEQ ID |
| | | | No: 342 | No: 343 | No: 344 |
| MYB | 149 | v-myb avian myeloblastosis viral | | SEQ ID | SEQ ID |
| | | oncogene homolog | | No: 354 | No: 355 |
| CTSB | 152 | cathepsin b | SEQ ID | | SEQ ID |
| | | | No: 361 | | No: 31 |
| MLANA | 153 | melan-a | SEQ ID | SEQ ID | SEQ ID |
| | | | No: 362 | No: 363 | No: 364 |
| APR-1 | 154 | apr-1 protein | SEQ ID | SEQ ID | SEQ ID |
| | | | No: 365 | No: 366 | No: 367 |
| TC21 | 157 | oncogene tc21 | SEQ ID | SEQ ID | SEQ ID |
| | | | No: 372 | No: 373 | No: 108 |
| CDKN3 | 159 | cyclin-dependent kinase inhibitor 3 | SEQ ID | SEQ ID | SEQ ID |
| | | (cdk2-associated dual specificity | No: 377 | No: 378 | No: 379 |
| | | phosphatase) | | | |
| XBP1 | 162 | x-box binding protein 1 | SEQ ID | SEQ ID | SEQ ID |
| | | | No: 385 | No: 386 | No: 387 |
| CDH15 | 166 | cadherin 15, m-cadherin (myotubule) | SEQ ID | SEQ ID | SEQ ID |
| | | | No: 396 | No: 397 | No: 398 |
| BCL2 | 167 | b-cell cll/lymphoma 2 | SEQ ID | SEQ ID | SEQ ID |
| | | | No: 399 | No: 400 | No: 117 |
| EST W73386 | 168 | ests | SEQ ID | | |
| | | | No: 401 | | |
| ILF1 | 171 | interleukin enhancer binding factor 1 | SEQ ID | SEQ ID | SEQ ID |
| | | | No: 406 | No: 407 | No: 408 |
| ARHGDIA | 172 | rho gdp dissociation inhibitor (gdi) | SEQ ID | SEQ ID | SEQ ID |
| | | alpha | No: 409 | No: 410 | No: 411 |
| C4A | 173 | complement component 4a | SEQ ID | | SEQ ID |
| | | | No: 412 | | No: 413 |
| ESR1 | 176 | estrogen receptor 1 | SEQ ID | SEQ ID | SEQ ID |
| | | | No: 420 | No: 421 | No: 422 |
| PBX1 | 177 | pre-b-cell leukemia transcription factor | SEQ ID | SEQ ID | SEQ ID |
| | | 1 | No: 423 | No: 424 | No: 425 |
| GLI3 | 178 | gli-kruppel family member gli3 (greig | SEQ ID | SEQ ID | SEQ ID |
| | | cephalopolysyndactyly syndrome) | No: 426 | No: 427 | No: 428 |
| ILF1 | 179 | interleukin enhancer binding factor 1 | SEQ ID | | SEQ ID |
| | | | No: 429 | | No: 408 |
| ESTs | 184 | Homo sapiens aminoacylase 1 (ACY1). | SEQ ID | SEQ ID | |
| H24628 & | | | No: 435 | No: 436 | |
| H24592 | | | | | |
| EST H28056 | 185 | Homo sapiens E74-like factor 1 (ets | SEQ ID | | |
| | | domain transcription factor) (ELF1) | No: 437 | | |

[0123] TABLE 9A

| Gene | SET | | | | |
|---|---|---|---|---|---|
| symbol | No | Name | Seq 3′ | Seq 5′ | Ref |
| VIL2 | 23 | villin 2 (ezrin) | SEQ ID | SEQ ID | SEQ ID |
| | | | No: 51 | No: 52 | No: 53 |
| MUC1 | 25 | mucin 1, transmembrane | | SEQ ID | SEQ ID |
| | | | | No: 57 | No: 58 |
| GATA3 | 32 | gata-binding protein 3 | SEQ ID | SEQ ID | SEQ ID |
| | | | No: 76 | No: 77 | No: 78 |
| GATA3 | 41 | gata-binding protein 3 | SEQ ID | SEQ ID | SEQ ID |
| | | | No: 100 | No: 101 | No: 78 |
| BCL2 | 48 | b-cell cll/lymphoma 2 | SEQ ID | SEQ ID | SEQ ID |
| | | | No: 115 | No: 116 | No: 117 |
| GATA3 | 51 | gata-binding protein 3 | SEQ ID | | SEQ ID |
| | | | No: 122 | | No: 78 |
| CRABP2 | 64 | cellular retinoic acid-binding protein 2 | SEQ ID | SEQ ID | SEQ ID |
| | | | No: 156 | No: 157 | No: 158 |
| ANG | 81 | angiogenin, ribonuclease, rnase a family, 5 | | SEQ ID | SEQ ID |
| | | | | No: 194 | No: 195 |
| EGF | 83 | epidermal growth factor (beta-urogastrone) | SEQ ID | | SEQ ID |
| | | | No: 199 | | No: 200 |
| THBS1 | 91 | thrombospondin 1 | SEQ ID | | SEQ ID |
| | | | No: 216 | | No: 217 |
| SMARCA2 | 99 | swi/snf related, matrix associated, actin | SEQ ID | SEQ ID | SEQ ID |
| | | dependent regulator of chromatin, subfamily | No. 235 | No.236 | No: 237 |
| | | a, member 2 | | | |
| EGF | 110 | epidermal growth factor (beta-urogastrone) | SEQ ID | | SEQ ID |
| | | | No: 262 | | No: 200 |
| BIRC4 | 116 | baculoviral iap repeat-containing 4 | SEQ ID | | SEQ ID |
| | | | No: 273 | | No: 274 |
| BCL2 | 142 | b-cell cll/lymphoma 2 | SEQ ID | SEQ ID | SEQ ID |
| | | | No: 337 | No: 338 | No: 117 |
| BS69 | 144 | adenovirus 5 ela binding protein | SEQ ID | SEQ ID | SEQ ID |
| | | | No: 342 | No: 343 | No: 344 |
| MYB | 149 | v-myb avian myeloblastosis viral oncogene | | SEQ ID | SEQ ID |
| | | homolog | | No: 354 | No: 355 |
| XBP1 | 162 | x-box binding protein 1 | SEQ ID | SEQ ID | SEQ ID |
| | | | No: 385 | No: 386 | No: 387 |
| BCL2 | 167 | b-cell cll/lymphoma 2 | SEQ ID | SEQ ID | SEQ ID |
| | | | No: 399 | No: 400 | No: 117 |
| ILF1 | 171 | interleukin enhancer binding factor 1 | SEQ ID | SEQ ID | SEQ ID |
| | | | No: 406 | No: 407 | No: 408 |
| ARHGDIA | 172 | rho gdp dissociation inhibitor (gdi) alpha | SEQ ID | SEQ ID | SEQ ID |
| | | | No: 409 | No: 410 | No: 411 |
| C4A | 173 | complement component 4a | SEQ ID | | SEQ ID |
| | | | No: 412 | | No: 413 |
| ESR1 | 176 | estrogen receptor 1 | SEQ ID | SEQ ID | SEQ ID |
| | | | No: 420 | No: 421 | No: 422 |
| PBX1 | 177 | pre-b-cell leukemia transcription factor 1 | SEQ ID | SEQ ID | SEQ ID |
| | | | No: 423 | No: 424 | No: 425 |
| GLI3 | 178 | gli-kruppel family member gli3 (greig | SEQ ID | SEQ ID | SEQ ID |
| | | cephalopolysyndactyly syndrome) | No: 426 | No: 427 | No: 428 |
| ILF1 | 179 | interleukin enhancer binding factor 1 | SEQ ID | | SEQ ID |
| | | | No: 429 | | No: 408 |
| ESTs | 184 | Homo sapiens aminoacylase 1 (ACY1). | SEQ ID | SEQ ID | |
| H24628 & | | | No: 435 | No: 436 | |
| H24592 | | | | | |
| EST | 185 | Homo sapiens E74-like factor 1 (ets domain | SEQ ID | | |
| H28056 | | transcription factor) (ELF1) | No: 437 | | |

[0124] TABLE 9B

| Gene | | | | | |
|---|---|---|---|---|---|
| symbol | SET No | Name | Seq 3′ | Seq 5′ | Ref |
| CTSB | 14 | cathepsin b | | SEQ ID | SEQ ID |
| | | | | No: 30 | No: 31 |
| EMR1 | 27 | egf-like module containing, mucin-like, | SEQ ID | SEQ ID | SEQ ID |
| | | hormone receptor-like sequence 1 | No: 62 | No: 63 | No: 64 |
| KIAA0427 | 28 | kiaa0427 gene product | SEQ ID | SEQ ID | SEQ ID |
| | | | No: 65 | No: 66 | No: 67 |
| PRLR | 39 | prolactin receptor | SEQ ID | SEQ ID | SEQ ID |
| | | | No: 94 | No: 95 | No: 96 |
| TC21 | 44 | oncogene tc21 | SEQ ID | SEQ ID | SEQ ID |
| | | | No: 106 | No: 107 | No: 108 |
| EDNRA | 96 | endothelin receptor type a | SEQ ID | | SEQ ID |
| | | | No: 228 | | No: 229 |
| ABCB1 | 108 | atp-binding cassette, sub-family b | SEQ ID | | SEQ ID |
| | | (mdr/tap), member 1 | No: 257 | | No: 258 |
| DAP3 | 117 | death associated protein 3 | SEQ ID | | SEQ ID |
| | | | No: 275 | | No: 276 |
| GNRH1 | 118 | gonadotropin-releasing hormone 1 | | SEQ ID | SEQ ID |
| | | (leutinizing-releasing hormone) | | No: 277 | No: 278 |
| DAP3 | 120 | death associated protein 3 | SEQ ID | SEQ ID | SEQ ID |
| | | | No: 282 | No: 283 | No: 276 |
| EST R97218 | 126 | ests, highly similar to tvhume hepatocyte | SEQ ID | SEQ ID | |
| | | growth factor receptor precursor | No: 296 | No: 297 | |
| | | [h. sapiens] | | | |
| CTSB | 152 | cathepsin b | SEQ ID | | SEQ ID |
| | | | No: 361 | | No: 31 |
| MLANA | 153 | melan-a | SEQ ID | SEQ ID | SEQ ID |
| | | | No: 362 | No: 363 | No: 364 |
| APR-1 | 154 | apr-1 protein | SEQ ID | SEQ ID | SEQ ID |
| | | | No: 365 | No: 366 | No: 367 |
| TC21 | 157 | oncogene tc21 | SEQ ID | SEQ ID | SEQ ID |
| | | | No: 372 | No: 373 | No: 108 |
| CDKN3 | 159 | cyclin-dependent kinase inhibitor 3 (cdk2- | SEQ ID | SEQ ID | SEQ ID |
| | | associated dual specificity phosphatase) | No: 377 | No: 378 | No: 379 |
| CDH15 | 166 | cadherin 15, m-cadherin (myotubule) | SEQ ID | SEQ ID | SEQ ID |
| | | | No: 396 | No: 397 | No: 398 |
| EST | 168 | ests | SEQ ID | | |
| W73386 | | | No: 401 | | |

[0125] Overexpression of genes detected by using at least one polynucleotide sequence selected among those included in each one of predefined polynucleotide sequence sets indicated in table 9A combined with underexpression of genes detected with at least one polynucleotide sequence selected among those included in each one of predefined polynucleotide sequence sets indicated in table 9B present a Good outcome.

[0126] So, a preferred DNA array according to the invention comprises at least one polynucleotide sequence selected among those included in each one of predefined polynucleotide sequences indicated in table 9A and at least one polynucleotide sequence selected among those included in each one of predefined polynucleotide sequences indicated in table 9B.

[0127] Such DNA arrays are particularly useful to distinguish patients having a high risk (Bad Outcome) from those having a good prognosis (Good Outcome). References

[0128] 1. DeRisi, J., Penland, L., Brown, P. O., Bittner, M. L., Meltzer, P. S., Ray, M., Chen, Y., Su, Y. A., and Trent, J. M. (1996) Use of a cDNA microarray to analyze gene expression patterns in human cancer. Nat Genet, 14, 457-460.

[0129] 2. Jordan, B. R. (1998) Large-scale expression measurement by hybridization methods: from high- density membranes to “DNA chips”. J. Biochem (Tokyo), 124, 251-258.

[0130] 3. Nguyen, C., Rocha, D., Granjeaud, S., Baldit, M., Bernard, K., Naquet, P., and Jordan, B. R. (1995) Differential gene expression in the murine thymus assayed by quantitative hybridization of arrayed cDNA clones. Genomics, 29, 207-216.

[0131] 4. Bertucci, F., Van Hulst, S., Bernard, K., Loriod, B., Granjeaud, S., Tagett, R., Starkey, M., Nguyen, C., Jordan, B., and Birnbaum, D. (1999) Expression scanning of an array of growth control genes in human tumor cell lines. Oncogene, 18, 3905-3912.

[0132] 5. Bertucci, F., Bernard, K., Loriod, B., Chang, Y. C., Granjeaud, S., Birnbaum, D., Nguyen, C., Peck, K., and Jordan, B. R. (1999) Sensitivity issues in DNA array-based expression measurements and performance of nylon microarrays for small samples [In Process Citation]. Hum Mol Genet, 8, 1715-1722.

[0133] 6. Ross, J. S. and Fletcher, J. A. (1999) The HER-2/neu oncogene: prognostic factor, predictive factor and target for therapy. Semin Cancer Biol, 9, 125-138.

[0134] 7. Scorilas, A., Trangas, T., Yotis, J., Pateras, C., and Talieri, M. (1999) Determination of c-myc amplification and overexpression in breast cancer patients: evaluation of its prognostic value against c-erbB-2, cathepsin-D and clinicopathological characteristics using univariate and multivariate analysis. Br J Cancer, 81, 1385-1391.

[0135] 8. Fox, S. B., Smith, K., Hollyer, J., Greenall, M., Hastrich, D., and Harris, A. L. (1994) The epidermal growth factor receptor as a prognostic marker: results of 370 patients and review of 3009 patients. Breast Cancer Res Treat, 29, 41-49.

[0136] 9. Heimann, R., Lan, F., McBride, R., and Hellman, S. (2000) Separating favorable from unfavorable prognostic markers in breast cancer: the role of E-cadherin. Cancer Res, 60, 298-304.

[0137] 10. Guerin, M., Sheng, Z. M., Andrieu, N., and Riou, G. (1990) Strong association between c-myband oestrogen-receptor expression in human breast cancer. Oncogene , 5, 131-135.

[0138] 11. Lim, K. C., Lakshmanan, G., Crawford, S. E., Gu, Y., Grosveld, F., and Douglas Engel, J. (2000) Gata 3 loss leads to embryonic lethality due to noradrenaline deficiency of the sympathetic nervous system. Nat Genet, 25, 209-212.

[0139] 12. Mills, K. J., Vollberg, T. M., Nervi, C., Grippo, J. F., Dawson, M. I., and Jetten, A. M. (1996) Regulation of retinoid-induced differentiation in embryonal carcinoma PCC 4.azalR cells: effects of retinoid-receptor selective ligands. Cell Growth Differ, 7, 327-337.

[0140] 13. Easty, D. J., Hill, S. P., Hsu, M. Y., Fallowfield, M. E., Florenes, V. A., Herlyn, M., and Bennett, D. C. (1999) Up-regulation of ephrin0A1 during melanoma progression. Int J Cancer, 84, 494-501.

[0141] 14. Shim, C., Zhang, W., Rhee, C. H., and Lee, J. H. (1998) Profiling of differentially expressed genes in human primary cervical cancer by complementary DNA expression array. Clin Cancer Res, 4, 3045-3050.

[0142] 15. Tsou, A. P., Wu, K. M., Tsen, T. Y., Chi, C. W., Chiu, J. H., Lui, W. Y., Hu, C. P., Chang, C., Chou, C. K., and Tsai, S. F. (1998) Parallel hybridization analysis of multiple protein kinase genes: identification of gene expression patterns characteristic of human hepatocellular carcinoma. Genomics, 50, 331-340.

[0143] 16. Schummer, M., Ng, W. V., Bumgarner, R. E., Nelson, P. S., Schummer, B., Bednarski, D. W., Hassell, L., Baldwin, R. L., Karlan, B. Y., and Hood, L. (1999) Comparative hybridization of an array of 21,500 ovarian cDNAs for the discovery of genes overexpressed in ovarian carcinomas. Gene, 238, 375-385.

[0144] 17. Alon, U., Barkai, N., Notterman, D. A., Gish, K., Ybarra, S., Mack, D., and Levine, A. J. (1999) Broad patterns of gene expression revealed by clustering analysis of tumor and normal colon tissues probed by oligonucleotide arrays. Proc Natl Acad Sci U S A, 96, 6745-6750.

[0145] 18. Moch, H., Schraml, P., Bubendorf, L., Mirlacher, M., Kononen, J., Gasser, T., Mihatsch, M. J., Kallioniemi, O. P., and Sauter, G. (1999) High-throughput tissue microarray analysis to evaluate genes uncovered by cDNA microarray screening in renal cell carcinoma. Am J Pathol, 154, 981-986.

[0146] 19. Rhee, C. H., Hess, K., Jabbur, J., Ruiz, M., Yang, Y., Chen, S., Chenchik, A., Fuller, G. N., and Zhang, W. (1999) cDNA expression array reveals heterogeneous gene expression profiles in three glioblastoma cell lines. Oncogene, 18, 2711-2717.

[0147] 20. Huang, F., Adelman, J., Jiang, H., Goldstein, N. I., and Fisher, P. B. (1999) Identification and temporal expression pattern of genes modulated during irreversible growth arrest and terminal differentiation in human melanoma cells. Oncogene, 18, 3546-3552.

[0148] 21. Bittner, M., Meltzer, P., Chen, Y., Jiang, Y., Seftor, E., Hendrix, M., Radmacher, M., Simon, R., Yakhini, Z., Ben-Dor, A., Sampas, N., Dougherty, E., Wang, E., Marincola, F., Gooden, C., Lueders, J., Glatfelter, A., Pollock, P., Carpten, J., Gillanders, E., Leja, D., Dietrich, K., Beaudry, C., Berens, M., Alberts, D., and Sondak, V. (2000) Molecular classification of cutaneous malignant melanoma by gene expression profiling. Nature, 406, 536-540.

[0149] 22. Khan, J., Simon, R., Bittner, M., Chen, Y., Leighton, S. B., Pohida, T., Smith, P. D., Jiang, Y., Gooden, G. C., Trent, J. M., and Meltzer, P. S. (1998) Gene expression profiling of alveolar rhabdomyosarcoma with cDNA microarrays. Cancer Res, 58, 5009-5013.

[0150] 23. Golub, T. R., Slonim, D. K., Tamayo, P., Huard, C., Gaasenbeek, M., Mesirov, J. P., Coller, H., Loh, M. L., Downing, J. R., Caligiuri, M. A., Bloomfield, C. D., and Lander, E. S. (1999) Molecular classification of cancer: class discovery and class prediction by gene expression monitoring. Science, 286, 531-537.

[0151] 24. Alizadeh, A. A., Eisen, M. B., Davis, R. E., Ma, C., Lossos, I. S., Rosenwald, A., Boldrick, J. C., Sabet, H., Tran, T., Yu, X., Powell, J. I., Yang, L., Marti, G. E., Moore, T., Hudson, J., Jr., Lu, L., Lewis, D. B., Tibshirani, R., Sherlock, G., Chan, W. C., Greiner, T. C., Weisenburger, D. D., Armitage, J. O., Warnke, R., and Staudt, L. M. (2000) Distinct types of diffuse large B-cell lymphoma identified by gene expression profiling [In Process Citation]. Nature, 403, 503-511.

[0152] 25. Hoch, R. V., Thompson, D. A., Baker, R. J., and Weigel, R. J. (1999) GATA-3 is expressed in association with estrogen receptor in breast cancer. Int J Cancer, 84, 122-128.

[0153] 26. Hilsenbeck, S. G., Friedrichs, W. E., Schiff, R., O° Connell, P., Hansen, R. K., Osborne, C. K., and Fuqua, S. A. (1999) Statistical analysis of array expression data as applied to the problem of tamoxifen resistance. J Natl Cancer Inst, 91, 453-459.

[0154] 27. Martin, K. J., Kritzman, B. M., Price, L. M., Koh, B., Kwan, C. P., Zhang, X., Mackay, A., O'Hare, M. J., Kaelin, C. M., Mutter, G. L., Pardee, A. B., and Sager, R. (2000) Linking gene expression patterns to therapeutic groups in breast cancer. Cancer Res, 60, 2232-2238.

[0155] 28. Yang, G. P., Ross, D. T., Kuang, W. W., Brown, P. O., and Weigel, R. J. (1999) Combining SSH and cDNA microarrays for rapid identification of differentially expressed genes. Nucleic Acids Res, 27, 1517-1523.

[0156] 29. Perou, C. M., Jeffrey, S. S., van de Rijn, M., Rees, C. A., Eisen, M. B., Ross, D. T., Pergamenschikov, A., Williams, C. F., Zhu, S. X., Lee, J. C., Lashkari, D., Shalon, D., Brown, P. O., and Botstein, D. (1999) Distinctive gene expression patterns in human mammary epithelial cells and breast cancers. Proc Natl Acad Sci U S A, 96, 9212-9217.

[0157] 30. Nacht, M., Ferguson, A. T., Zhang, W., Petroziello, J. M., Cook, B. P., Gao, Y. H., Maguire, S., Riley, D., Coppola, G., Landes, G. M., Madden, S. L., and Sukumar, S. (1999) Combining serial analysis of gene expression and array technologies to identify genes differentially expressed in breast cancer. Cancer Res, 59, 5464-5470.

[0158] 31. Sgroi, D. C., Teng, S., Robinson, G., LeVangie, R., Hudson, J. R., Jr., and Elkahloun, A. G. (1999) In vivo gene expression profile analysis of human breast cancer progression. Cancer Res, 59, 5656-5661.

[0159] 32. Perou, C. M., Sorlie, T., Eisen, M. B., van de Rijn, M., Jeffrey, S. S., Rees, C. A., Pollack, J. R., Ross, D. T., Johnsen, H., Akslen, L. A., Fluge, O., Pergamenschikov, A., Williams, C., Zhu, S. X., Lonning, P. E., Borresen-Dale, A. L., Brown, P. O., and Botstein, D. (2000) Molecular portraits of human breast tumours. Nature, 406, 747-752.

[0160] 33. Hahnel, E., Harvey, J. M., Joyce, R., Robbins, P. D., Sterrett, G. F., and Hahnel, R. (1993) Stromelysin-3 expression in breast cancer biopsies: clinico- pathological correlations. Int J Cancer, 55, 771-774.

[0161] 34. Skoog, L., Humla, S., Klintenberg, C., Pasqual, M., and Wallgren, A. (1985) Receptors for retinoic acid and retinol in human mammary carcinomas. Eur J Cancer Clin Oncol, 21, 901-906.

[0162] 35. Thor, A. D., Moore, D. H., I I, Edgerton, S. M., Kawasaki, E. S., Reihsaus, E., Lynch, H. T., Marcus, J. N., Schwartz, L., Chen, L. C., Mayall, B. H., and et al. (1992) Accumulation of p 53 tumor suppressor gene protein: an independent marker of prognosis in breast cancers. J Natl Cancer Inst, 84, 845-855.

[0163] 36. Allred, D. C., Harvey, J. M., Berardo, M., and Clark, G. M. (1998) Prognostic and predictive factors in breast cancer by immunohistochemical analysis. Mod Pathol , 11, 155-168.

[0164] 37. Spencer, K. S., Graus-Porta, D., Leng, J., Hynes, N. E., and Klemke, R. L. (2000) ErbB 2 is necessary for induction of carcinoma cell invasion by ErbB family receptor tyrosine kinases. J Cell Biol, 148, 385-397.

[0165] 38. Behrens, J. (1993) The role of cell adhesion molecules in cancer invasion and metastasis. Breast Cancer Res Treat, 24, 175-184.

[0166] 39. Roberts, D. D. (1996) Regulation of tumor growth and metastasis by thrombospondin-1. Faseb J, 10, 1183-1191.

[0167] 40. Taylor-Papadimitriou, J., Burchell, J., Miles, D. W., and Dalziel, M. (1999) MUCI and cancer. Biochim Biophys Acta, 1455, 301-313.

[0168] 41. Sneath, R. J. and Mangham, D. C. (1998) The normal structure and function of CD44 and its role in neoplasia. Mol Pathol, 51, 191-200.

[0169] 42. Iyer, V. R., Eisen, M. B., Ross, D. T., Schuler, G., Moore, T., Lee, J. C. F., Trent, J. M., Staudt, L. M., Hudson, J., Jr., Boguski, M. S., Lashkari, D., Shalon, D., Botstein, D., and Brown, P. O. (1999) The transcriptional program in the response of human fibroblasts to serum. Science, 283, 83-87.

[0170] 43. Theillet, C., Adelaide, J., Louason, G., Bonnet-Dorion, F., Jacquemier, J., Adnane, J., Longy, M., Katsaros, D., Sismondi, P., Gaudray, P., and et al. (1993) FGFRI and PLAT genes and DNA amplification at 8p12 in breast and ovarian cancers. Genes Chromosomes Cancer, 7, 219-226.

[0171] 44. Granjeaud, S., Nguyen, C., Rocha, D., Luton, R., and Jordan, B. R. (1996) From hybridization image to numerical values: a practical, high throughput quantification system for high density filter hybridizations. Genet Anal, 12, 151-162.

[0172] 45. Eisen, M. B., Spellman, P. T., Brown, P. O., and Botstein, D. (1998) Cluster analysis and display of genome-wide expression patterns. Proc Natl Acad Sci U S A , 95, 14863-14868.

[0173] 46. Ferrari, S., Battini, R., and Cossu, G. (1990) Differentiation-dependent expression of apolipoprotein A-I in chicken myogenic cells in culture. Dev Biol, 140, 430-436.

The application's sequence listing, which the Patent Office published only in electronic form, follows.

SEQUENCE LISTING (468 sequences)

SEQ ID NO: 1 - DNA, 317 bp, Homo sapiens
  3' terminal sequence. HIV-1 rev binding protein (HRB) gene
  modified_base (120): a, t, c or g
  modified_base (128): a, t, c or g
  modified_base (185): a, t, c or g
  modified_base (193): a, t, c or g
  modified_base (207): a, t, c or g
  modified_base (249): a, t, c or g
  modified_base (282): a, t, c or g
  modified_base (305): a, t, c or g
tttttttcacctgcaaactgtagcaaaacatgatcagctttattatgcagacaggtatccctctacattttaaaagaatttaggcatgtataaatagaagagctctttagaaaggaaaanttcaagantgaataaaaccttccaattttgactctgttactttccagtagcaatggttaaaatgnttttaggncattcattccaagntatatgacagcaccttaaaagtggctgatctatttccccagnaacatttctcacataacaatgtggttaacgttncaactactgcatatgcacaaatnggctaatttcta

SEQ ID NO: 2 - DNA, 2584 bp, Homo sapiens
  HIV-1 rev binding protein (HRB) gene
tggcggcggcggcggcggttgtcccggctgtgccggttggtgtggcccgtcagcccgcgtaccacagcgcccgggccgcgtcgagcccagtacagccaagccgctgcggccgggtccggcgcgggcggcgcgcgcagacggagggcggcggccgcggccagggcggcccgtgggaccgcgggcccccggcgcagcgctgcccggctcccggccctgccggcctcctcccttggcgccgcggccatggcggccagcgcgaagcggaagcaggaggagaagcacctgaagatgctgcgggacatgaccggcctcccgcgcaaccgaaagtgcttcgactgcgaccagcgcggccccacctacgttaacatgacggtcggctccttcgtgtgtacctcctgctccggcagcctgcgaggattaaatccaccacacagggtgaaatctatctccatgacaacattcacacaacaggaaattgaattcttacaaaaacatggaaatgaagtctgtaaacagatttggctaggattatttgatgatagatcttcagcaattccagacttcagggatccacaaaaagtgaaagagtttctacaagaaaagtatgaaaagaaaagatggtatgtcccgccagaacaagccaaagtcgtggcatcagttcatgcatctatttcagggtcctctgccagtagcacaagcagcacacctgaggtcaaaccactgaaatctcttttaggggattctgcaccaacactgcacttaaataagggcacacctagtcagtccccagttgtaggtcgttctcaagggcagcagcaggagaagaagcaatttgaccttttaagtgatctcggctcagacatctttgctgctccagctcctcagtcaacagctacagccaattttgctaactttgcacatttcaacagtcatgcagctcagaattctgcaaatgcagattttgcaaactttgatgcatttggacagtctagtggttcgagtaattttggaggtttccccacagcaagtcactctccttttcagccccaaactacaggtggaagtgctgcatcagtaaatgctaattttgctcattttgataacttccccaaatcctccagtgctgattttggaaccttcaatacttcccagagtcatcaaacagcatcagctgttagtaaagtttcaacgaacaaagctggtttacagactgcagacaaatatgcagcacttgctaatttagacaatatcttcagtgccgggcaaggtggtgatcagggaagtggctttgggaccacaggtaaagctcctgttggttctgtggtttcagttcccagtcagtcaagtgcatcttcagacaagtatgcagctctggcagaactagacagcgttttcagttctgcagccacctccagtaatgcgtatacttccacaagtaatgctagcagcaatgtttttggaacagtgccagtggttgcttctgcacagacacagcctgcttcatcaagtgtgcctgctccatttggacgtacgccttccacaaatccatttgttgctgctgctggtccttctgtggcatcttctacaaacccatttcagaccaatgccagaggagcaacagcggcaacctttggcactgcatccatgagcatgcccacgggattcggcactcctgctccctacagtcttcccaccagctttagtggcagctttcagcagcctgcctttccagcccaagcagctttccctcaacagacagctttttctcaacagcccaatggtgcaggttttgcagcatttggacaaacaaagccagtagtaaccccttttggtcaagttgcagctgctggagtatctagtaatccttttatgactggtgcaccaacaggacaatttccaacaggaagctcatcaaccaatcctttcttatagccttatatagacaatttactggaacgaacttttatgtggtcacattacatctctccacctcttgcactgttgtcttgtttcactgatcttagctttaaacacaagagaagtctttaaaaagcctgcattgtgtattaaacaccaggtaatatgtgcaaaaccgagggctccagtaacaccttctaacctgtgaattggcagaaaagggtagcggtatcatgtatattaaaattggctaatattaagttattgcagataccacattcattatgctgcagtactgtacatatttttcttagaaattagctatttgtgcatatcagtatttgtaactttaacacattgttatgtgagaaatgttactggggaaatagatcagccacttttaaggtgctgtcatatatcttggaatgaatgacctaaaatcattttaaccattgctactggaaagtaacagagtcaaaattggaaggttttattcattcttgaatttttcctttctaaagagctcttctatttatacatgcctaaattcttttaaaatgtagagggatacctgtctgcataataaagctgatcatgttttgctacagtttgcaggtgaaaaaaaataaatattataaaataaaaaaaaaaaaaaagaaaaaaaaaa

SEQ ID NO: 3 - DNA, 417 bp, Homo sapiens
  5' terminal sequence. gata-binding protein 1 (globin transcription factor 1) (GATA1) gene.
  modified_base (8): a, t, c or g
  modified_base (307): a, t, c or g
  modified_base (326): a, t, c or g
  modified_base (334): a, t, c or g
  modified_base (358): a, t, c or g
  modified_base (372): a, t, c or g
  modified_base (380): a, t, c or g
  modified_base (393): a, t, c or g
  modified_base (401): a, t, c or g
  modified_base (412): a, t, c or g
ccaggagntgcattggagttccctggcctggggtccctggggcttcagagcccctcccccagtttgtggatcctgctctggtgtcctccacaccagaatcaggggttttcttcccctctgggcctgagggcttggatgcagcagcttcctccactgccccgagcacagccaccgctgcagctgcggcactggcctactacagggacgctgaggcctacagacactccccagtctttcaggtgtacccattgcttcaactgtatggaggggatcccagggggcttcaccatattgccggctggggctnacggaaaggacgggggttntaacctgncttcaattgtgtgttcccaaccgngagaatttttcttncccagggncttggaagatttnggattggnaaaagggaagnaacaa

SEQ ID NO: 4 - DNA, 1498 bp, Homo sapiens
  gata-binding protein 1 (globin transcription factor 1) (GATA1) gene.
gcaaaggccaaggccagccaggacaccccctgggatcacactgagcttgccacatccccaaggcggccgaaccctccgcaaccaccagcccaggttaatccccagaggctccatggagttccctggcctggggtccctggggacctcagagcccctcccccagtttgtggatcctgctctggtgtcctccacaccagaatcaggggttttcttcccctctgggcctgagggcttggatgcagcagcttcctccactgccccgagcacagccaccgctgcagctgcggcactggcctactacagggacgctgaggcctacagacactccccagtctttcaggtgtacccattgctcaactgtatggaggggatcccagggggctcaccatatgccggctgggcctacggcaagacggggctctaccctgcctcaactgtgtgtcccacccgcgaggactctcctccccaggccgtggaagatctggatggaaaaggcagcaccagcttcctggagactttgaagacagagcggctgagcccagacctcctgaccctgggacctgcactgccttcatcactccctgtccccaatagtgcttatgggggccctgacttttccagtaccttcttttctcccaccgggagccccctcaattcagcagcctattcctctcccaagcttcgtggaactctccccctgcctccctgtgaggccagggagtgtgtgaactgcggagcaacagccactccactgtggcggagggacaggacaggccactacctatgcaacgcctgcggcctctatcacaagatgaatgggcagaacaggcccctcatccggcccaagaagcgcctgattgtcagtaaacgggcaggtactcagtgcaccaactgccagacgaccaccacgacactgtggcggagaaatgccagtggggatcccgtgtgcaatgcctgcggcctctactacaagctacaccaggtgaaccggccactgaccatgcggaaggatggtattcagactcgaaaccgcaaggcatctggaaaagggaaaaagaaacggggctccagtctgggaggcacaggagcagccgaaggaccagctggtggctttatggtggtggctgggggcagcggtagcgggaattgtggggaggtggcttcaggcctgacactgggccccccaggtactgcccatctctaccaaggcctgggccctgtggtgctgtcagggcctgttagccacctcatgcctttccctggacccctactgggctcacccacgggctccttccccacaggccccatgccccccaccaccagcactactgtggtggctccgctcagctcatgagggcacagagcatggcctccagaggaggggtggtgtccttctcctcttgtagccagaattctggacaacccaagtctctgggccccaggcaccccctggcttgaaccttcaaagcttttgtaaaataaaaccaccaaagtcctg

SEQ ID NO: 5 - DNA, 423 bp, Homo sapiens
  5' terminal sequence. tousled-like kinase 2 (TLK2) gene.
  modified_base (375): a, t, c or g
  modified_base (401): a, t, c or g
  modified_base (406): a, t, c or g
ggcacgaggagaatacgattcttaaagctactgaagtgcagttcccgccaaagccagtagtaacacctgaagcaaaggcgtttattcgacgatgcttggcctaccgaaagaggaccgcattgatgtccagcagctggcctgtgatccctacttgttgcctcacatccgaaagtcagtctctacaagtagccctgctggagctgctattgcatcaacctctggggcgtccaataacagttcttctaattgagactgactccaaggccacaaactgttcaacacacacaaagtgggacaaatgggcgtttcagcaggcgggtttgggaacataggcgaatccgaatgggtacttgatggaaacctgttaccaggtgntttttattttatttgaattttttttnccatnccttagaggcttggaca

SEQ ID NO: 6 - DNA, 3327 bp, Homo sapiens
  tousled-like kinase 2 (TLK2) gene.
ccgggcggggggttgcggcgctcaggagaggccccggctccgccccgggcctgcccagggggagagcggagctccgcagccgggtcgggtcggggcccctcccgggaggagcgtggagcgcggcggcggcggcggcagcagaaatgatggaagaattgcatagcctggacccacgacggcaggaattattggaggccaggtttactggagtaggtgttagtaagggaccacttaatagtgagtcttccaaccagagcttgtgcagcgtcggatccttgagtgataaagaagtagagactcccgagaaaaagcagaatgaccagcgaaatcggaaaagaaaagctgaaccatatgaaactagccaagggaaaggcactcctaggggacataaaattagtgattactttgagtttgctgggggaagcgcgccaggaaccagccctggcagaagtgttccaccagttgcacgatcctcaccgcaacattccttatccaatcccttaccgcgacgagtagaacagcccctctatggtttagatggcagtgctgcaaaggaggcaacggaggagcagtctgctctgccaaccctcatgtcagtgatgctagcaaaacctcggcttgacacagagcagctggcgcaaaggggagctggcctctgcttcacttttgtttcagctcagcaaaacagtccctcatctacgggatctggcaacacagagcattcctgcagctcccaaaaacagatctccatccagcacagacggacccagtccgacctcacaatagaaaaaatatctgcactagaaaacagtaagaattctgacttagagaagaaggagggaagaatagatgatttattaagagccaactgtgatttgagacggcagattgatgaacagcaaaagatgctagagaaatacaaggaacgattaaatagatgtgtgacaatgagcaagaaactccttatagaaaagtcaaaacaagagaagatggcgtgtagagataagagcatgcaagaccgcttgagactgggccactttactactgtccgacacggagcctcatttactgaacagtggacagatggttatgcttttcagaatcttatcaagcaacaggaaaggataaattcacagagggaagagatagaaagacaacggaaaatgttagcaaagcggaaacctcctgccatgggtcaggcccctcctgcaaccaatgagcagaaacagcggaaaagcaagaccaatggagctgaaaatgaaacgttaacgttagcagaataccatgaacaagaagaaatcttcaaactcagattaggtcatcttaaaaaggaggaagcagagatccaggcagagctggagagactagaaagggttagaaatctacatatcagggaactaaaaaggatacataatgaagataattcacaatttaaagatcatccaacgctaaatgacagatatttgttgttacatcttttgggtagaggaggtttcagtgaagtttacaaggcatttgatctaacagagcaaagatacgtagctgtgaaaattcaccagttaaataaaaactggagagatgagaaaaaggagaattaccacaagcatgcatgtagggaataccggattcataaagagctggatcatcccagaatagttaagctgtatgattacttttcactggatactgactcgttttgtacagtattagaatactgtgagggaaatgatctggacttctacctgaaacagcacaaattaatgtcggagaaagaggcccggtccattatcatgcagattgtgaatgctttaaagtacttaaatgaaataaaacctcccatcatacactatgacctcaaaccaggtaatattcttttagtaaatggtacagcgtgtggagagataaaaattacagattttggtctttcgaagatcatggatgatgatagctacaattcagtggatggcatggagctaacatcacaaggtgctggtacttattggtatttaccaccagagtgttttgtggttgggaaagaaccaccaaagatctcaaataaagttgatgtgtggtcggtgggtgtgatcttctatcagtgtctttatggaaggaagccttttggccataaccagtctcagcaagacatcctacaagagaatacgattcttaaagctactgaagtgcagttcccgccaaagccagtagtaacacctgaagcaaaggcgtttattcgacgatgcttggcctaccgaaagagggaccgcattgatgtccagcagctggcctgtgatccctacttgttgcctcacatccgaaagtcagtctctacaagtagccctgctggagctgctattgcatcaacctctggggcgtccaataacagttcttctaattgagactgactccaaggccacaaactgttcaacacacacaaagtggacaaatggcgttcagcagcgggtttggaacatagcgaatccgaatggatctgatgaaacctgtaccaggtgcttttattttcttgcttttttcccatccatagagcatgacagcatcgattctcattgaggagaaaccttgggcagctccggccaggccttgtaggaaaaggccccgcccgaggttccagcgtcaacggccactgtgtgtggctgctctgagtgaggaaaaaattaaaaagaaaaactggttccatgtactgtgaacttgaaaacttgcagactcaggggggtccctgatgcagtgcttcagatgaagaatgtggacttgaaaatacagactgggctagtccagtgtctatatttaaacttgttcttttcttttaataaagtttaggtaacatctcctgaaaagcttgtagcacaaaggctcagctggggatggtgtttgacttcggaggaaaaaagttgctattgcccgttaaaggcactagagttagtgttttatccctaaataatttcaatttttaaaaacatgcagcttccctctccccttttttatttttgaaagaatacatttggtcataaagtgaaacccgtattagcaagtacgaggcaatgttcattccaatcagatgcagctttctcctccgtctggtctcctgtttgcaattgcttccctcatctcagtagggaaaaaattgagtgggagtactgagatgtgtgggtttttgccattggacaaagaatgaggttagaagactgcagcttggagtctctctaggttttcaactatttcttcacaatttgaacacttgacggttgtcccttttaatttatttgaagtgctatttttttaaataaaggttcatctgtccatgcaaaaaaa

SEQ ID NO: 7 - DNA, 300 bp, Homo sapiens
  3' terminal sequence. ests, weakly similar to alu7_human alu subfamily sq sequence contamination warning entry [H.sapiens] (EST T81919) gene.
  modified_base (2): a, t, c or g
  modified_base (17): a, t, c or g
  modified_base (18): a, t, c or g
  modified_base (79): a, t, c or g
  modified_base (114): a, t, c or g
  modified_base (265): a, t, c or g
tncaagagacagggttnngcacattgcccaggatggtctcaaactcctagagttgagctatccacccacctttggcctnccaaagtgctgggatcacaggcgtgagtcactgtntccagcacccatctggaggcttcttaaagcccaggccccacgccgagcttctgagtcaataaagaagtctgcatttctaacaagcttctaggggatgctgctgctgctgctggtccaggggccccactttgaagaaccactgcactgggtntttcctctgggacccgaatgcctgtgcttctcccc

SEQ ID NO: 8 - DNA, 369 bp, Homo sapiens
  5' terminal sequence. ests, weakly similar to alu7_human alu subfamily sq sequence contamination warning entry [H.sapiens] (EST T81919) gene.
  modified_base (294): a, t, c or g
  modified_base (320): a, t, c or g
  modified_base (350): a, t, c or g
cctaacgcaggtttccccgcaaatgactggtcacgcgggactgaacaccgcacaggcaggaggcatggcaagggtaagtgaactgaagcactttcaatacttcctacctaaccgcgggctttccctccgagtaatgcgtaaaatgggaccacgtggcccactcctgtttttcctcttgggctctccacgtgccactcatgcttggaagagacagatttctttctaggataaagatctctgccccatttctgtcttttaaaatggagaattctttaaagaagtagggacagcttncagggtcagggcagtttgggaaagtnacaggggcctaattgtgttccgtggaaacnggggtaggaggtttgcttt

SEQ ID NO: 9 - DNA, 255 bp, Homo sapiens
  3' terminal sequence. cyclin d1 (prad1: parathyroid adenomatosis 1) (CCND1) gene.
  modified_base (26): a, t, c or g
  modified_base (139): a, t, c or g
  modified_base (195): a, t, c or g
  modified_base (238): a, t, c or g
aaagacagtttttgggtaatcttttncttttgcttaagtcagagatggaagggggaaagagcaaaggaaaaaacaaccaacaacaaggagaatgaagctttcccttctggtatcaaaatgctccggagaggagggactntcagtggagcacctggggccggctccgcctcgctgcgggtggcggtggcgcccctngcctggcgccttcagatgtccacgtcccgcacgtcggtgggtntgcaagccaggtccacc

SEQ ID NO: 10 - DNA, 1325 bp, Homo sapiens
  cyclin d1 (prad1: parathyroid adenomatosis 1) (CCND1) gene.
gcagtagcagcgagcagcagagtccgcacgctccggcgaggggcagaagagcgcgagggagcgcggggcagcagaagcgagagccgagcgcggacccagccaggacccacagccctccccagctgcccaggaagagccccagccatggaacaccagctcctgtgctgcgaagtggaaaccatccgccgcgcgtaccccgatgccaacctcctcaacgaccgggtgctgcgggccatgctgaaggcggaggagacctgcgcgccctcggtgtcctacttcaaatgtgtgcagaaggaggtcctgccgtccatgcggaagatcgtcgccacctggatgctggaggtctgcgaggaacagaagtgcgaggaggaggtcttcccgctggccatgaactacctggaccgcttcctgtcgctggagcccgtgaaaaagagccgcctgcagctgctgggggccacttgcatgttcgtggcctctaagatgaaggagaccatccccctgacggccgagaagctgtgcatctacaccgacggctccatccggcccgaggagctgctgcaaatggagctgctcctggtgaacaagctcaagtggaacctggccgcaatgaccccgcacgatttcattgaacacttcctctccaaaatgccagaggcggaggagaacaaacagatcatccgcaaacacgcgcagaccttcgttgcctcttgtgccacagatgtgaagttcatttccaatccgccctccatggtggcagcggggagcgtggtggccgcagtgcaaggcctgaacctgaggagccccaacaacttcctgtcctactaccgcctcacacgcttcctctccagagtgatcaagtgtgacccagactgcctccgggcctgccaggagcagatcgaagccctgctggagtcaagcctgcgccaggcccagcagaacatggaccccaaggccgccgaggaggaggaagaggaggaggaggaggtggacctggcttgcacacccaccgacgtgcgggacgtggacatctgaggggcccaggcaggcgggcgccaccgccacccgcagcgagggcggagccggccccaggtgctccacatgacagtccctcctctccggagcattttgataccagaagggaaagcttcattctccttgttgttggttgttttttcctttgctctttcccccttccatctctgacttaagcaaaagaaaaagattacccaaaaactgtctttaaaagagagagagagaaaaaaaaaaaaaaaaaaaaaaaaaaaaaaaaaaaaaaaaaaaaaaaaaaaaaaaaaaaaaaaaaaaaa

SEQ ID NO: 11 - DNA, 449 bp, Homo sapiens
  5' terminal sequence. signal transducer and activator of transcription 1, 91kd (STAT1) gene.
  modified_base (371): a, t, c or g
  modified_base (388): a, t, c or g
  modified_base (399): a, t, c or g
  modified_base (421): a, t, c or g
  modified_base (438): a, t, c or g
atttgaaagtcaaagtcttatttgataaagatgtgaatgagagaaatacagtaaaaggatttaggaagttcaacattttgggcacgcacacaaaagtgatgaacatggaggagtccaccaatggcagtctggcggctgaatttcggcacctgcaattgaaagaacagaaaaatgctggcaccagaacgaatgagggtcctctcatcgttactgaagagcttcactcccttagttttgaaacccaattgtgccagcctgggtttggtaattgacctcgagacgacctctctgcccgttgtgggtgatctccaacgtcagccagctcccgagcggttggggcctccattcctttgggtacaacatgctgggtnggcgggaacccggggantctgttccttntttcctggactccaccatgtgncacggtggggtttcagnttttcagaagt

SEQ ID NO: 12 - DNA, 4003 bp, Homo sapiens
  signal transducer and activator of transcription 1, 91kd (STAT1) gene.
attaaacctctcgccgagcccctccgcagactctgcgccggaaagtttcatttgctgtatgccatcctcgagagctgtctaggttaacgttcgcactctgtgtatataacctcgacagtcttggcacctaacgtgctgtgcgtagctgctcctttggttgaatccccaggcccttgttggggcacaaggtggcaggatgtctcagtggtacgaacttcagcagcttgactcaaaattcctggagcaggttcaccagctttatgatgacagttttcccatggaaatcagacagtacctggcacagtggttagaaaagcaagactgggagcacgctgccaatgatgtttcatttgccaccatccgttttcatgacctcctgtcacagctggatgatcaatatagtcgcttttctttggagaataacttcttgctacagcataacataaggaaaagcaagcgtaatcttcaggataattttcaggaagacccaatccagatgtctatgatcatttacagctgtctgaaggaagaaaggaaaattctggaaaacgcccagagatttaatcaggctcagtcggggaatattcagagcacagtgatgttagacaaacagaaagagcttgacagtaaagtcagaaatgtgaaggacaaggttatgtgtatagagcatgaaatcaagagcctggaagatttacaagatgaatatgacttcaaatgcaaaaccttgcagaacagagaacacgagaccaatggtgtggcaaagagtgatcagaaacaagaacagctgttactcaagaagatgtatttaatgcttgacaataagagaaaggaagtagttcacaaaataatagagttgctgaatgtcactgaacttacccagaatgccctgattaatgatgaactagtggagtggaagcggagacagcagagcgcctgtattggggggccgcccaatgcttgcttggatcagctgcagaactggttcactatagttgcggagagtctgcagcaagttcggcagcagcttaaaaagttggaggaattggaacagaaatacacctacgaacatgaccctatcacaaaaaacaaacaagtgttatgggaccgcaccttcagtcttttccagcagctcattcagagctcgtttgtggtggaaagacagccctgcatgccaacgcaccctcagaggccgctggtcttgaagacaggggtccagttcactgtgaagttgagactgttggtgaaattgcaagagctgaattataatttgaaagtcaaagtcttatttgataaagatgtgaatgagagaaatacagtaaaaggatttaggaagttcaacattttgggcacgcacacaaaagtgatgaacatggaggagtccaccaatggcagtctggcggctgaatttcggcacctgcaattgaaagaacagaaaaatgctggcaccagaacgaatgagggtcctctcatcgttactgaagagcttcactcccttagttttgaaacccaattgtgccagcctggtttggtaattgacctcgagacgacctctctgcccgttgtggtgatctccaacgtcagccagctcccgagcggttgggcctccatcctttggtacaacatgctggtggcggaacccaggaatctgtccttcttcctgactccaccatgtgcacgatgggctcagctttcagaagtgctgagttggcagttttcttctgtcaccaaaagaggtctcaatgtggaccagctgaacatgttgggagagaagcttcttggtcctaacgccagccccgatggtctcattccgtggacgaggttttgtaaggaaaatataaatgataaaaattttcccttctggctttggattgaaagcatcctagaactcattaaaaaacacctgctccctctctggaatgatgggtgcatcatgggcttcatcagcaaggagcgagagcgtgccctgttgaaggaccagcagccggggaccttcctgctgcggttcagtgagagctcccgggaaggggccatcacattcacatgggtggagcggtcccagaacggaggcgaacctgacttccatgcggttgaaccctacacgaagaaagaactttctgctgttactttccctgacatcattcgcaattacaaagtcatggctgctgagaatattcctgagaatcccctgaagtatctgtatccaaatattgacaaagaccatgcctttggaaagtattactccaggccaaaggaagcaccagagccaatggaacttgatggccctaaaggaactggatatatcaagactgagttgatttctgtgtctgaagttcacccttctagacttcagaccacagacaacctgctccccatgtctcctgaggagtttgacgaggtgtctcggatagtgggctctgtagaattcgacagtatgatgaacacagtatagagcatgaatttttttcatcttctctggcgacagttttccttctcatctgtgattccctcctgctactctgttccttcacatcctgtgtttctagggaaatgaaagaaaggccagcaaattcgctgcaacctgttgatagcaagtgaatttttctctaactcagaaacatcagttactctgaagggcatcatgcatcttactgaaggtaaaattgaaaggcattctctgaagagtgggtttcacaagtgaaaaacatccagatacacccaaagtatcaggacgagaatgagggtcctttgggaaaggagaagttaagcaacatctagcaaatgttatgcataaagtcagtgcccaactgttataggttgttggataaatcagtggttatttagggaactgcttgacgtaggaacggtaaatttctgtgggagaattcttacatgttttctttgctttaagtgtaactggcagttttccattggtttacctgtgaaatagttcaaagccaagtttatatacaattatatcagtcctctttcaaaggtagccatcatggatctggtagggggaaaatgtgtattttattacatctttcacattggctatttaaagacaaagacaaattctgtttcttgagaagagaatattagctttactgtttgttatggcttaatgacactagctaatatcaatagaaggatgtacatttccaaattcacaagttgtgtttgatatccaaagctgaatacattctgctttcatcttggtcacatacaattatttttacagttctcccaagggagttaggctattcacaaccactcattcaaaagttgaaattaaccatagatgtagataaactcagaaatttaattcatgtttcttaaatgggctactttgtcctttttgttattagggtggtatttagtctattagccacaaaattgggaaaggagtagaaaaagcagtaactgacaacttgaataatacaccagagataatatgagaatcagatcatttcaaaactcatttcctatgtaactgcattgagaactgcatatgtttcgctgatatatgtgtttttcacatttgcgaatggttccattctctctcctgtactttttccagacacttttttgagtggatgatgtttcgtgaagtatactgtatttttacctttttccttccttatcactgacacaaaaagtagattaagagatgggtttgacaaggttcttcccttttacatactgctgtctatgtggctgtatcttgtttttccactactgctaccacaactatattatcatgcaaatgctgtattcttctttggtggagataaagatttcttgagttttgttttaaaattaaagctaaagtatctgtattgcattaaatataatatcgacacagtgctttccgtggcactgcatacaatctgaggcctcctctctcagtttttatatagatggcgagaacctaagtttcagttgattttacaattgaaatgactaaaaaacaaagaagacaacattaaaaacaatattgtttcta

SEQ ID NO: 13 - DNA, 167 bp, Homo sapiens
  3' terminal sequence. fibroblast growth factor receptor 2 (FGFR2) gene.
  modified_base (112): a, t, c or g
  modified_base (141): a, t, c or g
  modified_base (161): a, t, c or g
ccacctctgctcggtgaaaattaagaaattatgtgtaagaacagcatttagcaaatagctattaaaaaaagagagaccaattttctaggtgcattgggacatccatttaaantcaatacaaaaaataactccttgtaaatntataatatattatttatacntaattt

SEQ ID NO: 14 - DNA, 414 bp, Homo sapiens
  5' terminal sequence. fibroblast growth factor receptor 2 (FGFR2) gene.
  modified_base (334): a, t, c or g
  modified_base (376): a, t, c or g
  modified_base (406): a, t, c or g
ggacacagaatggataagccagccaactgcaccaacgaactgtacatgatgatgagggactgttggcatgcagtgcctcccagagaccaacgttcaagcagttggtagaagacttggatcgaattctcactctcacaaccaatgaggaatacttggacctcagccaacctctcgaacagtattcacctagttaccctgacacaagaagttcttgttcttcaggagatgattctgttttttctccagaccccatgccttacgaaccatgccttcctcagtatccacacataaacgggcagtgttttaaaacatgaatgactgtgtctggcctgtnccccaaacagggacaggcactgggggaacctaggctacattnaggcaggggaggacccttgccttcccaggngtttgttt

SEQ ID NO: 15 - DNA, 4667 bp, Homo sapiens
  fibroblast growth factor receptor 2 (FGFR2) gene.
gagcgggcgagggagcgcgcgcggccgccacaaagctcgggcgccgcggggctgcatgcggcgtacctggcccggcgcggcgactgctctccgggctggcgggggccggccgcgagccccgggggccccgaggccgcagcttgcctgcgcgctctgagccttcgcaactcgcgagcaaagtttggtggaggcaacgccaagcctgagtcctttcttcctctcgttccccaaatccgagggcagcccgcgggcgtcatgcccgcgctcctccgcagcctggggtacgcgctgaagcccgggaggcttggcgccggcgaagacccaaggaccactcttctgcgtttggagttgctccccacaaccccgggctcgtcgctttctccatcccgacccagccggggcgcggggacaacacaggtcgcggaggagcgttgccattcaagtgactgcagcagcagcggcagcgcctcggttcctgagcccaccgcaggctgaaggcattgcgcgtagtccatgcccgtagaggaagtgtgcagatgggattaacgtccacatggagatatggaagaggaccggggattggtaccgtaaccatggtcagctggggtcgtttcatctgcctggtcgtggtcaccatggcaaccttgtccctggcccggccctccttcagtttagttgaggataccacattagagccagaagagccaccaaccaaataccaaatctctcaaccagaagtgtacgtggctgcgccaggggagtcgctagaggtgcgctgcctgttgaaagatgccgccgtgatcagttggactaaggatggggtgcacttggggcccaacaataggacagtgcttattggggagtacttgcagataaagggcgccacgcctagagactccggcctctatgcttgtactgccagtaggactgtagacagtgaaacttggtacttcatggtgaatgtcacagatgccatctcatccggagatgatgaggatgacaccgatggtgcggaagattttgtcagtgagaacagtaacaacaagagagcaccatactggaccaacacagaaaagatggaaaagcggctccatgctgtgcctgcggccaacactgtcaagtttcgctgcccagccggggggaacccaatgccaaccatgcggtggctgaaaaacgggaaggagtttaagcaggagcatcgcattggaggctacaaggtacgaaaccagcactggagcctcattatggaaagtgtggtcccatctgacaagggaaattatacctgtgtggtggagaatgaatacgggtccatcaatcacacgtaccacctggatgttgtggagcgatcgcctcaccggcccatcctccaagccggactgccggcaaatgcctccacagtggtcggaggagacgtagagtttgtctgcaaggtttacagtgatgcccagccccacatccagtggatcaagcacgtggaaaagaacggcagtaaatacgggcccgacgggctgccctacctcaaggttctcaaggttctcaaggccgccggtgttaacaccacggacaaagagattgaggttctctatattcggaatgtaacttttgaggacgctggggaatatacgtgcttggcgggtaattctattgggatatcctttcactctgcatggttgacagttctgccagcgcctggaagagaaaaggagattacagcttccccagactacctggagatagccatttactgcataggggtcttcttaatcgcctgtatggtggtaacagtcatcctgtgccgaatgaagaacacgaccaagaagccagacttcagcagccagccggctgtgcacaagctgaccaaacgtatccccctgcggagacaggtttcggctgagtccagctcctccatgaactccaacaccccgctggtgaggataacaacacgcctctcttcaacggcagacacccccatgctggcaggggtctccgagtatgaacttccagaggacccaaaatgggagtttccaagagataagctgacactgggcaagcccctgggagaaggttgctttgggcaagtggtcatggcggaagcagtgggaattgacaaagacaagcccaaggaggcggtcaccgtggccgtgaagatgttgaaagatgatgccacagagaaagacctttctgatctggtgtcagagatggagatgatgaagatgattgggaaacacaagaatatcataaatcttcttggagcctgcacacaggatgggcctctctatgtcatagttgagtatgcctctaaaggcaacctccgagaatacctccgagcccggaggccacccgggatggagtactcctatgacattaaccgtgttcctgaggagcagatgaccttcaaggacttggtgtcatgcacctaccagctggccagaggcatggagtacttggcttcccaaaaatgtattcatcgagatttagcagccagaaatgttttggtaacagaaaacaatgtgatgaaaatagcagactttggactcgccagagatatcaacaatatagactattacaaaaagaccaccaatgggcggcttccagtcaagtggatggctccagaagccctgtttgatagagtatacactcatcagagtgatgtctggtccttcggggtgttaatgtgggagatcttcactttagggggctcgccctacccagggattcccgtggaggaactttttaagctgctgaaggaaggacacagaatggataagccagccaactgcaccaacgaactgtacatgatgatgagggactgttggcatgcagtgccctcccagagaccaacgttcaagcagttggtagaagacttggatcgaattctcactctcacaaccaatgaggaatacttggacctcagtcagcctctcgaaccgtattcaccttgttatcctgacccaagatgaaataaaacgtctctcttcccttctttcaggaatacttggacctcagccaacctctcgaacagtattcacctagttaccctgacacaagaagttcttgttcttcaggagatgattctgttttttctccagaccccatgccttacgaaccatgccttcctcagtatccacacataaacggcagtgttaaaacatgaatgactgtgtctgcctgtccccaaacaggacagcactgggaacctagctacactgagcagggagaccatgcctcccagagcttgttgtctccacttgtatatatggatcagaggagtaaataattggaaaagtaatcagcatatgtgtaaagatttatacagttgaaaacttgtaatcttccccaggaggagaagaaggtttctggagcagtggactgccacaagccaccatgtaacccctctcacctgccgtgcgttctggctgtggaccagtaggactcaaggtggacgtgcgttctgccttccttgttaattttgtaataattggagaagatttatgtcagcacacacttacagagcacaaatgcagtatataggtgctggatgtatgtaaatatattcaaattatgtataaatatatattatatatttacaaggagttattttttgtattgattttaaatggatgtcccaatgcacctagaaaattggtctctctttttttaatagctatttgctaaatgctgttcttacacataatttcttaattttcaccgagcagaggtggaaaaatacttttgctttcagggaaaatggtataacgttaatttattaataaattggtaatatacaaaacaattaatcatttatagttttttttgtaatttaagtggcatttctatgcaggcagcacagcagactagttaatctattgcttggacttaactagttatcagatcctttgaaaagagaatatttacaatatatgactaatttggggaaaatgaagttttgatttatttgtgtttaaatgctgctgtcagacgattgttcttagacctcctaaatgccccatattaaaagaactcattcataggaaggtgtttcattttggtgtgcaaccctgtcattacgtcaacgcaacgtctaactggacttcccaagataaatggtaccagcgtcctcttaaaagatgccttaatccattccttgaggacagaccttagttgaaatgatagcagaatgtgcttctctctggcagctggccttctgcttctgagttgcacattaatcagattagcctgattctcttcagtgaattttgataatggcttccagactctttgcgttggagacgcctgttaggatcttcaagtcccatcatagaaaattgaaacacagagttgttctgctgatagttttggggatacgtccatctttttaagggattgctttcatctaattctggcaggacctcaccaaaagatccagcctcatacctacatcagacaaaatatcgccgttgttccttctgtactaaagtattgtgttttgctttggaaacacccactcactttgcaatagccgtgcaagatgaatgcagattacactgatcttatgtgttacaaaattggagaaagtatttaataaaacctgttaatttttatactgacaataaaaatgtttctacagatattaatgttaacaagacaaaataaatgtcacgcaactt

SEQ ID NO: 16 - DNA, 483 bp, Homo sapiens
  3' terminal sequence. ests (EST T89980) gene.
  modified_base (434): a, t, c or g
  modified_base (448): a, t, c or g
  modified_base (461): a, t, c or g
gtgttgagctcccaaaaggcttaaaacttgctttgtgaatgaatgatcttaaatcactagtgaagatgatcatggggcatttgcacattaaagaactaaaatgaaatgaaaaagccatgactcctcacttaatgctattaaaaaaaaatctgatttggtaaattaaccccacttctcatagtttaattgggtaatcaacgttcttgggaattcaggttctcatgggcaccctaatagtgtttagggccgggggtcctgaggctgctgggggtgatcccgaggaacaagaagctgccctattaaaagtaatctacttgagtttttcccgagtctttgggagttgttccctactgtggggctacttataggggtagggccccccaaatccctcacacttaggtcggccctgctggcttgctgtggggctctgaaangcagccgctaggangtccccaagcctnaacttacccattttctggcctg

SEQ ID NO: 17 - DNA, 400 bp, Homo sapiens
  3' terminal sequence. protein phosphatase 3 (formerly 2b), catalytic subunit, gamma isoform (calcineurin a gamma) (PPP3CC) gene.
  modified_base (1): a, t, c or g
  modified_base (235): a, t, c or g
  modified_base (326): a, t, c or g
  modified_base (364): a, t, c or g
  modified_base (376): a, t, c or g
ntttatatatattgaacataaattaaaagaatttataaaacagccacctttttacagaataaatgcagactgaattataaatgcacctccacgttgaagttgttttgagttgcttttcattttccaataataaataaatagaatttgttcttgagttttagatccacctgagccacggcaggactctaagtcatgaatgggctttcttcccttggtcgctcctgtgcgcagatgntgagtgtgctgaggttacagatttcattggcccaccagcgtgtatgctatcctttcgggggtgggcattcgctcattaattcgggcccagnccctcgcgctttctttcaaaactccgggatcttgtgcntggaggcgaggnacccctctgatgggcttcccgggg

SEQ ID NO: 18 - DNA, 490 bp, Homo sapiens
  5' terminal sequence. protein phosphatase 3 (formerly 2b), catalytic subunit, gamma isoform (calcineurin a gamma) (PPP3CC) gene.
  modified_base (356): a, t, c or g
  modified_base (384): a, t, c or g
  modified_base (397): a, t, c or g
  modified_base (437): a, t, c or g
  modified_base (456): a, t, c or g
  modified_base (469): a, t, c or g
  modified_base (482): a, t, c or g
cttggagcactatacccacaacactgtccgagggtgctcttatttctacagttaccctgcagtttgtgaatttttgcagaacaataatttactatcaattatcagagcccatgaagcccaagatgctgggtatcgaatgtacaggaagagccaagccacaggttttccatcacttattacaattttctctgcccccaattacctagatgtctataacaataaagctgctgtgttgaaatatgaaaacaatgtcatgaatatcaggcagtttaactgttctccacacccctactgggcttccaaactttatgggatgttttcacatgggtctttgccttttgttggggggaccccgnacacagaggatggctgggtaaatgtggntcaacattatggntctggatggacggaactgattttctggatggatggaagcnggatgggaaggcacttacngtttcgtaagggnggttcttcggggnttaggttc

SEQ ID NO: 19 - DNA, 2134 bp, Homo sapiens
  protein phosphatase 3 (formerly 2b), catalytic subunit, gamma isoform (calcineurin a gamma) (PPP3CC) gene.
gggccacccttagcagcggtcgcggtcggtgccgaagcggtgttccccgccttagccgctgcgcctcccaagagagcggccggtgggccctcgtcctgtcagtggcgtcggaggccggcctgcggtggccgcgcccttctggtgctcggacaccgctgaggagccggggccgggcacggctggctgacggctccgggcagctaaggctgcccgaggagaaggcggcggccgcggcgtaggcgcacgtccggcgggctcctggagcctggaggaggccgaggggaccatgtccgggaggcgcttccacctctccaccaccgaccgcgtcatcaaagctgtcccctttcctccaacccaacggcttactttcaaggaagtatttgagaatgggaaacctaaagttgatgttttaaaaaaccatttggtaaaggaaggacgactggaagaggaagtagccttaaagataatcaatgatggggctgccatcctgaggcaagagaagactatgatagaagtagatgctccaatcacagtatgtggtgatattcatggacaattctttgacctaatgaagttatttgaagttggaggatcacctagtaacacacgctacctctttctgggtgactatgtggacagaggctatttcagtatagagtgtgtgctgtatttatggagtttaaagattaatcatcccaaaacattgtttctgcttcggggaaatcatgaatgcaggcatcttacagactatttcaccttcaaacaggaatgtcgaatcaaatattcggaacaggtgtatgatgcctgtatggagacatttgactgtcttcctcttgctgccctcttaaaccagcagtttctctgtgtacatggaggaatgtcacctgaaattacttctttagatgacattaggaaattagacaggtttacggaacctcccgcctttggacctgtgtgtgacctgctttggtctgatccctcagaggattatggcaatgagaagaccttggagcactatacccacaacactgtccgagggtgctcttatttctacagttaccctgcagtttgtgaatttttgcagaacaataatttactatcaattatcagagcccatgaagcccaagatgctgggtatcgaatgtacaggaagagccaagccacaggctttccatcacttattacaattttctctgcccccaattacctagatgtctataacaataaagctgctgtgttgaaatatgaaaacaatgtcatgaatatcaggcagtttaactgttctccacacccctactggcttccaaactttatggatgttttcacatggtctttgccttttgttggggaaaaagtcacagagatgctggtaaatgtgctcaacatatgctctgatgacgaactgatttctgatgatgaagcagaaggaagcactacagttcgtaaggagatcatcaggaataagatcagagccattgggaagatggcacgggtcttttcaattcttcggcaagaaagtgagagtgtgctgactctcaagggcctgactcccacaggcacactccctctgggcgtcctctcaggaggcaagcagactatcgagacagccatcagagggttctcgcttcagcacaagatccggagttttgaagaagcgcgaggtctggaccgaattaatgagcgaatgccaccccgaaaggatagcatataccctggtgggccaatgaaatctgtaacctcagcacactcacatgctgcgcacaggagcgaccaagggaagaaagcccattcatgacttagagtcctgccgtgctcaggtggatctaaaactcaagaacaaattctatttatttattattggaaaatgaaaagcaactcaaaacaacttcaacctggaggtgcatttataattcagtctgcatttattctgtaaaaaggtgactgttttataaattcttttaatttatgttcaatatatataaaaagtgcatctgttttgtttttcccttttttctccataattttaagaaatgaatctgattgttgtcaacacatttgtgaagtcttgtgctataaaggggaacttcccctaataaaagggccttggaaacctcaaacctgggtttctgacccc

SEQ ID NO: 20 - DNA, 248 bp, Homo sapiens
  3' terminal sequence. ests (EST T90726) gene.
  modified_base (177): a, t, c or g
  modified_base (224): a, t, c or g
  modified_base (235): a, t, c or g
atccatttattatatccaatgctaaacactaccacttggactctaagatatgtttatgcctctctgtttattctagttttttaaaaatcaaatatacaagatctacaattatttatatccaagatgtctacaccactgcctaagaagctattaaaatatttgtatttgtgcaatggnacccattattcacatgggcctaggattaaaaagtcaatttatattgngaataaatttntccaaaaaaacca

SEQ ID NO: 21 - DNA, 427 bp, Homo sapiens
  5' terminal sequence. ests (EST T90726) gene.
  modified_base (333): a, t, c or g
  modified_base (360): a, t, c or g
  modified_base (385): a, t, c or g
  modified_base (393): a, t, c or g
  modified_base (405): a, t, c or g
  modified_base (410): a, t, c or g
taagatacgaacgagaaacctgatttattgctcatccttcccttgcctccctaatggcaagcaaaactctgaacatctgaaaaggatgtagttctggacaaatcctgactacccagaggaaactcactgtgagattgctgttgatttgaagggtgctttcactaaggttatattttaaagtagaataacacatgctgagtgtaaactgggctttggattggtcagctgcagtagtacaaaaacagcatagaatttgaggaaaactaaaactgctatgagataggctatgaggaaaacttaaaactggctatgtggtaggaaatgatgttaaanttatgtggggaaagtttttcccctccntattacttcacattacaggcctttngaggggcntctgggctctgnacccngtttgatgggcctttga

SEQ ID NO: 22 - DNA, 294 bp, Homo sapiens
  3' terminal sequence. sry (sex determining region y)-box 4 (SOX4) gene.
  modified_base (161): a, t, c or g
  modified_base (257): a, t, c or g
  modified_base (271): a, t, c or g
tttcttgtttttctttttttttttccgaaaccactcgccctccactgactgcccctgtaccacatcaaacagtctcctctcctccacgcctccggggtctgggaagtctcacctcactgatttcacgtagaaaagaaggcggaggccagcagccgcgcgcncaagctccccaacgtgcaaatccatttcagtttgaccgtgaacccccttccagttcgtgtcctcctccgcccccgcccctagctcccgctgctggnttccaacggggttntcgggtcatttcctagcgccggt

SEQ ID NO: 23 - DNA, 362 bp, Homo sapiens
  5' terminal sequence. sry (sex determining region y)-box 4 (SOX4) gene.
  modified_base (211): a, t, c or g
  modified_base (313): a, t, c or g
  modified_base (318): a, t, c or g
  modified_base (327): a, t, c or g
  modified_base (332): a, t, c or g
ttccggacttgtctgcacccccagcaagaaggcgagttagttttctagagacttgaaggagtctcccccttcctgcatcaccaccttggttttgttttattttgcttcttggtcaagaaaggaggggagaacccagcgcacccctcccccctttttttaaacgcgtgatgaagacagaaggctccggggtgacgaatttggccgatggagnatgttttgggggaacgccgggactgagagactccacggcagggcgaattcccgtttggggctttttttttcctccctctttttccccttgccccttttgcanccggnggagggagntgttnaaggggagggagggccagccagtgttgacc

SEQ ID NO: 24 - DNA, 2797 bp, Homo sapiens
  sry (sex determining region y)-box 4 (SOX4) gene.
ttccccagcattcgagaaactcctctctactttagcacggtctccagactcagccgagagacagcaaactgcagcgcggtgagagagcgagagagagggagagagagactctccagcctgggaactataactcctctgcgagaggcggagaactccttccccaaatcttttggggacttttctctctttacccacctccgcccctgcgaggagttgaggggccagttcggccgccgcgcgcgtcttcccgttcggcgtgtgcttggcccggggaaccgggagggcccggcgatcgcgcggcggccgccgcgagggtgtgagcgcgcgtgggcgcccgccgagccgaggccatggtgcagcaaaccaacaatgccgagaacacggaagcgctgctggccggcgagagctcggactcgggcgccggcctcgagctgggaatcgcctcctcccccacgcccggctccaccgcctccacgggcggcaaggccgacgacccgagctggtgcaagaccccgagtgggcacatcaagcgacccatgaacgccttcatggtgtggtcgcagatcgagcggcgcaagatcatggagcagtcgcccgacatgcacaacgccgagatctccaagcggctgggcaaacgctggaagctgctcaaagacagcgacaagatccctttcattcgagaggcggagcggctgcgcctcaagcacatggctgactaccccgactacaagtaccggcccaggaagaaggtgaagtccggcaacgccaactccagctcctcggccgccgcctcctccaagccgggggagaagggagacaaggtcggtggcagtggcgggggcggccatgggggcggcggcggcggcgggagcagcaacgcggggggaggaggcggcggtgcgagtggcggcggcgccaactccaaaccggcgcagaaaaagagctgcggctccaaagtggcgggcggcgcgggcggtggggttagcaaaccgcacgccaagctcatcctggcaggcggcggcggcggcgggaaagcagcggctgccgccgccgcctccttcgccgccgaacaggcgggggccgccgccctgctgcccctgggcgccgccgccgaccaccactcgctgtacaaggcgcggactcccagcgcctcggcctccgcctcctcggcagcctcggcctccgcagcgctcgcggccccgggcaagcacctggcggagaagaaggtgaagcgcgtctacctgttcggcggcctgggcacgtcgtcgtcgcccgtgggcggcgtgggcgcgggagccgaccccagcgaccccctgggcctgtacgaggaggagggcgcgggctgctcgcccgacgcgcccagcctgagcggccgcagcagcgccgcctcgtcccccgccgccggccgctcgcccgccgaccaccgcggctacgccagcctgcgcgccgcctcgcccgccccgtccagcgcgccctcgcacgcgtcctcctcggcctcgtcccactcctcctcttcctcctcctcgggctcctcgtcctccgacgacgagttcgaagacgacctgctcgacctgaaccccagctcaaactttgagagcatgtccctgggcagcttcagttcgtcgtcggcgctcgaccgggacctggattttaacttcgagcccggctccggctcgcacttcgagttcccggactactgcacgcccgaggtgagcgagatgatctcgggagactggctcgagtccagcatctccaacctggttttcacctactgaagggcgcgcaggcagggagaagggccggggggggtaggagaggagaaaaaaaaagtgaaaaaaagaaacgaaaaggacagacgaagagtttaaagagaaaagggaaaaaagaaagaaaaagtaagcagggctcgttcgcccgcgttctcgtcgtcggatcaaggagcgcggcggcgttttggacccgcgctcccatcccccaccttcccgggccggggacccactctgcccagccggagggacgcggaggaggaagagggtagacaggggcgacctgtgattgttgttattgatgttgttgttgatggcaaaaaaaaaaagcgacttcgagtttgctcccctttgcttgaagagaccccctcccccttccaacgagcttccggacttgtctgcacccccagcaagaaggcgagttagttttctagagacttgaaggagtctcccccttcctgcatcaccaccttggttttgttttattttgcttcttggtcaagaaaggaggggagaacccagcgcacccctccccccctttttttaaacgcgtgatgaagacagaaggctccggggtgacgaatttggccgatggcagatgttttgggggaacgccgggactgagagactccacgcaggcgaattcccgtttggggcctttttttcctccctcttttccccttgccccctctgcagccggaggaggagatgttgaggggaggaggccagccagtgtgaccggcgctaggaaatgacccgagaaccccgttggaagcgcagcagcgggagctaggggcgggggcggaggaggacacgaactggaagggggttcacggtcaaactgaaatggatttgcacgttggggagctggcggcggcggctgctgggcctccgccttcttttctacgtgaaatcagtgaggtgagacttcccagaccccggaggcgtggaggagaggagactgtttgatgtggtacaggggcagtcagtggagggcgagtggtttcggaaaaaaaaaaagaaaaaaaggg

SEQ ID NO: 25 - DNA, 352 bp, Homo sapiens
  5' terminal sequence. ring finger protein 5 (RNF5) gene.
  modified_base (15): a, t, c or g
  modified_base (17): a, t, c or g
  modified_base (19): a, t, c or g
  modified_base (28): a, t, c or g
  modified_base (58): a, t, c or g
  modified_base (340): a, t, c or g
acgggggccccaacnanantcgcgagcngggcgtggcgggcgcgaccttcgaatgtantatatgtttggagactgctcgggaagctgtggtcagtgtgtgtggccacctgtactgttggccatgtcttcatcagtggctggagacacggccagaacggcaagagtgtccagtatgtaaagctgggatcagcagagagaaggttgtcccgctttatgggcgagggagccagaagccccaggatcccagattaaaaactccaccccgcccccaggccagagaccagctccggagagcagagggggattccagccatttggtgataccgggggcttccacttnttcatttggtgt

SEQ ID NO: 26 - DNA, 543 bp, Homo sapiens
  ring finger protein 5 (RNF5) gene.
atggcagcagcggaggaggaggacgggggccccgaagggccaaatcgcgagcggggcggggcgggcgcgaccttcgaatgtaatatatgtttggagactgctcgggaagctgtggtcagtgtgtgtggccacctgtactgttggccatgtcttcatcagtggctggagacacggccagaacggcaagagtgtccagtatgtaaagctgggatcagcagagagaaggttgtcccgctttatgggcgagggagccagaagccccaggatcccagattaaaaactccaccccgcccccagggccagagaccagctccggagagcagagggggattccagccatttggtgataccgggggcttccacttctcatttggtgttggtgcttttccctttggctttttcaccaccgtcttcaatgcccatgagcctttccgccggggtacaggtgtggatctgggacagggtcacccagcctccagctggcaggattccctcttcctgtttctcgccatcttcttctttttttggctgctcagtatttga

SEQ ID NO: 27 - DNA, 397 bp, Homo sapiens
  3' terminal sequence. axl receptor tyrosine kinase (AXL) gene.
  modified_base (183): a, t, c or g
  modified_base (211): a, t, c or g
  modified_base (279): a, t, c or g
  modified_base (307): a, t, c or g
  modified_base (310): a, t, c or g
  modified_base (345): a, t, c or g
  modified_base (350): a, t, c or g
  modified_base (361): a, t, c or g
  modified_base (380): a, t, c or g
  modified_base (388): a, t, c or g
gccgtggggtgggaaagtgggaaggtggagttttccccagtggcagtgcttagcttggatcctgagagggagtaccaggtggagggttgtctcaggcaccatcctcctgccctgggctgctggggagcccctatcagcaggctgagcggggctaggggttttggaagggcagaggacatagcntccagcaggatggacctcagccgcagtnaggcagctacaggaatccttagggtctggctgggttggggggtcagctcctcctgcagctccaggggnttcaggataacctccaccctcatccatnttnacatagaggatttcgtcaggctcctggggcaggangcaangcctttcagtntgttctccaaatcttcccncaactctntaaaacttt

SEQ ID NO: 28 - DNA, 418 bp, Homo sapiens
  5' terminal sequence. axl receptor tyrosine kinase (AXL) gene.
  modified_base (244): a, t, c or g
  modified_base (278): a, t, c or g
  modified_base (298): a, t, c or g
  modified_base (322): a, t, c or g
  modified_base (349): a, t, c or g
  modified_base (354): a, t, c or g
  modified_base (374): a, t, c or g
  modified_base (394): a, t, c or g
  modified_base (414): a, t, c or g
ctgaatgagaacatgtccgtgtgtgtggcggacttcgggctctccaagaagatctacaatggggactactaccgccaggaccgtatcgccaagatgccagtcaagtggattgccattgagagtctagctgaccgtgtctacaccagcaagagcgatgtgtggtccttcggggtgacaatgtgggagattgccacaagaggccaaaccccatatccggggcgtggagaacagcgagatttatgantatctgcgccagggaaatcgcctgaagcagcctncggactgtcttggatgggantgttatgccttgatgttcgcggtncttggggagcttaaattccccaggggncccgnccaattttttacaaagcttncggggaagatttttgggagnacacacttttaagggctttncctt

SEQ ID NO: 29 - DNA, 5015 bp, Homo sapiens
  axl receptor tyrosine kinase (AXL) gene.
  modified_base (4593): a, t, c or g
  modified_base (4594): a, t, c or g
gagtggagttctggaggaatgtttaccagacacagagcccagagggacagcgcccagagcccagatagagagacacggcctcactggctcagcaccagggtccccttccccctcctcagctccctccctggcccctttaagaaagagctgatcctctcctctcttgagttaacccctgattgtccaggtggcccctggctctggcctggtgggcggaggcaaagggggagccaggggcggagaaagggttgcccaagtctgggagtgagggaaggaggcaggggtgctgagaaggcggctgctgggcagagccggtggcaagggcctcccctgccgctgtgccaggcaggcagtgccaaatccggggagcctggagctggggggagggccggggacagcccggcccgctgccccctcccccgctgggagcccagcaacttctgaggaaagtttggcacccatggcgtggcggtgccccaggatgggcagggtcccgctggcctggtgcttggcgctgtgcggctgggcgtgcatggcccccaggggcacgcaggctgaagaaagtcccttcgtgggcaacccagggaatatcacaggtgcccggggactcacgggcacccttcggtgtcagctccaggttcagggagagccccccgaggtacattggcttcgggatggacagatcctggagctcgcggacagcacccagacccaggtgcccctgggtgaggatgaacaggatgactggatagtggtcagccagctcagaatcacctccctgcagctttccgacacgggacagtaccagtgtttggtgtttctgggacatcagaccttcgtgtcccagcctggctatgttgggctggagggcttgccttacttcctggaggagcccgaagacaggactgtggccgccaacacccccttcaacctgagctgccaagctcagggacccccagagcccgtggacctactctggctccaggatgctgtccccctggccacggctccaggtcacggcccccagcgcagcctgcatgttccagggctgaacaagacatcctctttctcctgcgaagcccataacgccaagggggtcaccacatcccgcacagccaccatcacagtgctcccccagcagccccgtaacctccacctggtctcccgccaacccacggagctggaggtggcttggactccaggcctgagcggcatctaccccctgacccactgcaccctgcaggctgtgctgtcagacgatgggatgggcatccaggcgggagaaccagaccccccagaggagcccctcacctcgcaagcatccgtgcccccccatcagcttcggctaggcagcctccatcctcaccccccttatcacatccgcgtggcatgcaccagcagccagggcccctcatcctggacccactggcttcctgtggagacgccggagggagtgcccctgggcccccctgagaacattagtgctacgcggaatgggagccaggccttcgtgcattggcaagagccccgggcgcccctgcagggtaccctgttagggtaccggctggcgtatcaaggccaggacaccccagaggtgctaatggacatagggctaaggcaagaggtgaccctggagctgcagggggacgggtctgtgtccaatctgacagtgtgtgtggcagcctacactgctgctggggatggaccctggagcctcccagtacccctggaggcctggcgcccaggggaagcacagccagtccaccagctggtgaaggaaccttcaactcctgccttctcgtggccctggtggtatgtactgctaggagcagtcgtggccgctgcctgtgtcctcatcttggctctcttccttgtccaccggcgaaagaaggagacccgttatggagaagtgtttgaaccaacagtggaaagaggtgaactggtagtcaggtaccgcgtgcgcaagtcctacagtcgtcggaccactgaagctaccttgaacagcctgggcatcagtgaagagctgaaggagaagctgcgggatgtgatggtggaccggcacaaggtggccctggggaagactctgggagagggagagtttggagctgtgatggaaggccagctcaaccaggacgactccatcctcaaggtggctgtgaagacgatgaagattgccatctgcacgaggtcagagctggaggatttcctgagtgaagcggtctgcatgaaggaatttgaccatcccaacgtcatgaggctcatcggtgtctgtttccagggttctgaacgagagagcttcccagcacctgtggtcatcttacctttcatgaaacatggagacctacacagcttcctcctctattcccggctcgggggccagccagtgtacctgcccactcagatgctagtgaagttcatggcagacatcgccagtggcatggagtatctgagtaccaagagattcatacaccgggacctggcggccaggaactgcatgctgaatgagaacatgtccgtgtgtgtggcggacttcgggctctccaagaagatctacaatggggactactaccgccagggacgtatcgccaagatgccagtcaagtggattgccattgagagtctagctgaccgtgtctacaccagcaagagcgatgtgtggtccttcggggtgacaatgtgggagattgccacaagaggccaaaccccatatccgggcgtggagaacagcgagatttatgactatctgcgccagggaaatcgcctgaagcagcctgcggactgtctggatggactgtatgccttgatgtcgcggtgctgggagctaaatccccaggaccggccaagttttacagagctgcgggaagatttggagaacacactgaaggccttgcctcctgcccaggagcctgacgaaatcctctatgtcaacatggatgagggtggaggttatcctgaaccccctggagctgcaggaggagctgaccccccaacccagccagaccctaaggattcctgtagctgcctcactgcggctgaggtccatcctgctggacgctatgtcctctgcccttccacaacccctagccccgctcagcctgctgataggggctccccagcagccccagggcaggaggatggtgcctgagacaaccctccacctggtactccctctcaggatccaagctaagcactgccactgggggaaactccaccttcccactttcccaccccacgccttatccccacttgcagccctgtcttcctacctatcccacctccatcccagacaggtccctggccttctctgtgcagtagcatcaccttgaaagcagtagcatcaccatctgtaaaaggaaggggttggattgcaatatctgaagccctcccaggtgttaacattccaagactctagagtccaaggtttaaagagtctagattcaaaggttctaggtttcaaagatgctgtgagtctttggttctaaggacctgaaattccaaagtctctaattctattaaagtgctaaggttctaaggcctacttttttttttttttttttttttttttttttttttgcgatagagtctcactgtgtcacccaggctggagtgcagtggtgcaatctcgcctcactgcaaccttcacctaccgagttcaagtgattttcctgccttggcctcccaagtagctgggattacaggtgtgtgccaccacacccggctaatttttatatttttagtagagacagggtttcaccatgttggccaggctggtctaaaactcctgacctcaagtgatctgcccacctcagcctcccaaagtgctgagattacaggcatgagccactgcactcaaccttaagacctactgttctaaagctctgacattatgtggttttagattttctggttctaacatttttgataaagcctcaaggttttaggttctaaagttctaagattctgattttaggagctaaggctctatgagtctagatgtttattcttctagagttcagagtccttaaaatgtaagattatagattctaaagattctatagttctagacatggaggttctaaggcctaggattctaaaatgtgatgttctaaggctctgagagtctagattctctggctgtaaggctctagatcataaggcttcaaaatgttatcttctcaagttctaagattctaatgatgatcaattatagtttctgaggctttatgataatagattctcttgtataagatcctagatcctaagggtcgaaagctctagaatctgcaattcaaaagttccaagagtctaaagatggagtttctaaggtccggtgttctaagatgtgatattctaagacttactctaagatcttagattctctgtgtctaagattctagatcagatgctccaagattctagatgattaaataagattctaacggtctgttctgtttcaaggcactctagattccattggtccaagattccggatcctaagcatctaagttataagactctcacactcagttgtgactaactagacaccaaagttctaataatttctaatgttggacacctttaggttctttgctnnattctgcctctctaggaccatggttaagagtccaagaatccacatttctaaaatcttatagttctaggcactgtagttctaagactcaaatgttctaagtttctaagattctaaaggtccacaggtctagactattaggtgcaatttcaaggttctaaccctatactgtagtattctttggggtgcccctctccttcttagctatcattgcttcctcctccccaactgtgggggtgtgcccccttcaagcctgtgcaatgcattagggatgcctcctttccgcaggggatggacgatctcccacctttcgggccatgttgcccccgtgagccaatccctcaccttctgagtacagagtgtggactctggtgcctccagaggggctcaggtcacataaaactttgtatatcaacgaaaaaaa

SEQ ID NO: 30 - DNA, 439 bp, Homo sapiens
  5' terminal sequence. cathepsin b (CTSB) gene.
  modified_base (330): a, t, c or g
  modified_base (339): a, t, c or g
  modified_base (406): a, t, c or g
  modified_base (422): a, t, c or g
  modified_base (435): a, t, c or g
aacacgtcaccggagagatgatgggtggccatgcatccgcatcctgggctggggagtggagaatggcacaccctactggctggttgccaactcctggaacactgactggggtgacaatggcttctttaaaatactcagaggacaggatcactgtggaatcgaatcagaagtggtggctggaattccacgcaccgatcagtactgggaaaagatctaatctgccgtgggcctgtcgtgccagtcctggggggcgagatcggggtagaaatgcattttattctttaagttcacgttaaggatacaagttttcagacagggtctgaaagggantgggatttnggccaaacatcagacctgttctttcccaagggaggaccaagttcctgggctaacattccccagcctnttggtttaacagttgncaggacagggccntgtt

SEQ ID NO: 31 - DNA, 1996 bp, Homo sapiens
  cathepsin b (CTSB) gene.
tccggcaacgccaaccgctccgctgcgcgcaggctgggctgcaggctctcggctgcagcgctgggctggtgtgcagtggtgcgaccacggctcacggcagcctcagccacccagatgtaagcgatctggttcccacctcagcctcccgagtagtggatctaggatccggcttccaacatgtggcagctctgggcctccctctgctgcctgctggtgttggccaatgcccggagcaggccctctttccatcccctgtcggatgagctggtcaactatgtcaacaaacggaataccacgtggcaggccgggcacaacttctacaacgtggacatgagctacttgaagaggctatgtggtaccttcctgggtgggcccaagccaccccagagagttatgtttaccgaggacctgaagctgcctgcaagcttcgatgcacgggaacaatggccacagtgtcccaccatcaaagagatcagagaccagggctcctgtggctcctgctgggccttcggggctgtggaagccatctctgaccggatctgcatccacaccaatgcgcacgtcagcgtggaggtgtcggcggaggacctgctcacatgctgtggcagcatgtgtggggacggctgtaatggtggctatcctgctgaagcttggaacttctggacaagaaaaggcctggtttctggtggcctctatgaatcccatgtagggtgcagaccgtactccatccctccctgtgagcaccacgtcaacggctcccggcccccatgcacgggggagggagatacccccaagtgtagcaagatctgtgagcctggctacagcccgacctacaaacaggacaagcactacggatacaattcctacagcgtctccaatagcgagaaggacatcatggccgagatctacaaaaacggccccgtggagggagctttctctgtgtattcggacttcctgctctacaagtcaggagtgtaccaacacgtcaccggagagatgatgggtggccatgccatccgcatcctgggctggggagtggagaatggcacaccctactggctggttgccaactcctggaacactgactggggtgacaatggcttctttaaaatactcagaggacaggatcactgtggaatcgaatcagaagtggtggctggaattccacgcaccgatcagtactgggaaaagatctaatctgccgtgggcctgtcgtgccagtcctgggggcgagatcggggtagaaatgcattttattctttaagttcacgtaagatacaagtttcaggcagggtctgaaggactggattggccaaacatcagacctgtcttccaaggagaccaagtcctggctacatcccagcctgtggttacagtgcagacaggccatgtgagccaccgctgccagcacagagcgtccttccccctgtagactagtgccgtgggagtacctgctgcccagctgctgtggccccctccgtgatccatccatctccagggagcaagacagagacgcaggatggaaagcggagttcctaacaggatgaaagttcccccatcagttcccccagtacctccaagcaagtagctttccacatttgtcacagaaatcagaggagagatggtgttgggagccctttggagaacgccagtctccaggtccccctgcatctatcgagtttgcaatgtcacaacctctctgatcttgtgctcagcatgattctttaatagaagttttatttttcgtgcactctgctaatcatgtgggtgagccagtggaacagcgggagcctgtgctggtttgcagattgcctcctaatgacgcggctcaaaaggaaaccaagtggtcaggagttgtttctgacccactgatctctactaccacaaggaaaatagtttaggagaaaccagcttttactgtttttgaaaaattacagcttcaccctgtcaagttaacaaggaatgcctgtgccaataaaaggtttctccaacttga

SEQ ID NO: 32 - DNA, 492 bp, Homo sapiens
  3' terminal sequence. protein phosphatase 4 (formerly x), catalytic subunit (PPP4C) gene.
  modified_base (304): a, t, c or g
  modified_base (366): a, t, c or g
  modified_base (443): a, t, c or g
  modified_base (457): a, t, c or g
ttccatttttcttcttttattagaattttttcattttttttctcaaaatttttatctaaaaacaaacagaaaaaagaaggaaaaaaagaaaaaaaaattattggaaacttcatggttcaagtggggagagaggaggaggaacatggagctaggtctccaggcctctccagagaagtcctcaccctcgaagcaccctcttgggggacagcagagccagggacagcccccccccacgcccagcctccgtctgagggaagatgggcagagtcacagtgggtgcgaggggccagaagggttgggaggngggcaggggcgggcggggtcacaggaagtagttcggccacggctttctttgggagggggatnccccgtgtcttcttttgggggagcagccttcaaagatgatgaaatctttttcttgggagatgcttcgttccagcttnccaagattggcttnccacattttcccacagcggtacaagttagtttttg

SEQ ID NO: 33 - DNA, 330 bp, Homo sapiens
  5' terminal sequence. protein phosphatase 4 (formerly x), catalytic subunit (PPP4C) gene.
  modified_base (3): a, t, c or g
  modified_base (51): a, t, c or g
  modified_base (54): a, t, c or g
  modified_base (242): a, t, c or g
ctnttcatgggggactttgtggaccgtggcttctatagcgtcgaaacgttnctnctgctgctggcacttaaggttcgctatcctgatcgcatcacactgatccggggcaaccatgagagtcgccagatcacgcaggtctatggcttctacgatgagtgcctgcgcaagtaacggctcggtgactgtgtggcgctactgcactgagatctttgactacctcagcctgtcagccatcatcgatngaaagaatcttctgcgtgcacgggggcctctccccctccatccagaccctgggatccagattcggacaatcgaccgaaagcaagaggt

SEQ ID NO: 34 - DNA, 1429 bp, Homo sapiens
  protein phosphatase 4 (formerly x), catalytic subunit (PPP4C) gene.
gccacgaaggccggagagccggaaccggagtcgcagcggcggagacccctgtgcggtgcggagggggcggcggccccgactctgacccgcgccgggggtgggccatggcggagatcagcgacctggaccggcagatcgagcagctgcgtcgctgcgagctcatcaaggagagcgaagtcaaggccctgtgcgctaaggccagagagatcttggtagaggagagcaacgtgcagagggtggactcgccagtcacagtgtgcggcgacatccatggacaattctatgacctcaaagagctgttcagagtaggtggcgacgtccctgagaccaactacctcttcatgggggactttgtggaccgtggcttctatagcgtcgaaacgttcctcctgctgctggcacttaaggttcgctatcctgatcgcatcacactgatccggggcaaccatgagagtcgccagatcacgcaggtctatggcttctacgatgagtgcctgcgcaagtacggctcggtgactgtgtggcgctactgcactgagatctttgactacctcagcctgtcagccatcatcgatggcaagatcttctgcgtgcacgggggcctctccccctccatccagaccctggatcagattcggacaatcgaccgaaagcaagaggtgcctcatgatgggcccatgtgtgacctcctctggtctgacccagaagacaccacaggctggggcgtgagcccccgaggagccggctacctatttggcagtgacgtggtggcccagttcaacgcagccaatgacattgacatgatctgccgtgcccaccaactggtgatggaaggttacaagtggcacttcaatgagacggtgctcactgtgtggtcggcacccaactactgctaccgctgtgggaatgtggcagccatcttggagctggacgagcatctccagaaagatttcatcatctttgaggctgctccccaagagacacggggcatcccctccaagaagcccgtggccgactacttcctgtgaccccgcccggcccctgccccctccaacccttctggccctcgcaccactgtgactctgccatcttcctcagacggaggctgggcgtggggggggctgtcctggctctgctgtcccccaagagggtgcttcgagggtgaggacttctctggagaggcctggagacctagctccatgttcctcctcctctctccccacttgaaccatgaagtttccaataatttttttttctttttttccttcttttttctgtttgtttttagataaaaattttgagaaaaaaaatgaaaaaattctaataaaagaagaaaaatgaaaaaaaaaaaaaaaaaaaaaaaaaaaaaaaaaaaaaaaaaaaaaaaaaaaaaaaaaaaaaaaaaaaaaaaaaaaaaaaaaaaaaaaaa

SEQ ID NO: 35 - DNA, 492 bp, Homo sapiens
  3' terminal sequence. ests (EST T79867) gene.
  modified_base (142): a, t, c or g
  modified_base (252): a, t, c or g
  modified_base (303): a, t, c or g
  modified_base (320): a, t, c or g
  modified_base (338): a, t, c or g
  modified_base (347): a, t, c or g
  modified_base (437): a, t, c or g
  modified_base (446): a, t, c or g
  modified_base (458): a, t, c or g
  modified_base (471): a, t, c or g
  modified_base (476): a, t, c or g
  modified_base (482): a, t, c or g
tttttttgccacttcagctccaaaggtgaaacggcacagttaaaagcaagaaattttgtgtcccttccccaagctagctttggaataaatccacttttcttgtaccagaccccactcttgttaattggactctacatgtggnaagcaactaacttgattttcggttacaatataatattcaacttcagtaaatcaaagacaattttgaaagaagccaaagggaaaaaaatgacctgaagagtcctgtttaantttagatttctgaacacaaatctctggcgactaggactgaagcttgacctnttcctacccaggacccnttcccacctcactagggnactttggantgggatatatgtggggaaactcttgggctttccccattgtggcaccatttcatatcttatggcaaatggtgcctcctacctcccttgggncactccccngttggatgggtnttgggggaggagncctgntggggntttttcccat

SEQ ID NO: 36 - DNA, 354 bp, Homo sapiens
  3' terminal sequence. fibroblast growth factor receptor 4 (FGFR4) gene.
  modified_base (133): a, t, c or g
  modified_base (297): a, t, c or g
  modified_base (335): a, t, c or g
  modified_base (342): a, t, c or g
tttttgttttttatttcaaaaaaataatttataaaacgccatttgctcctgttttcggcaggcttccagcttctctgggctcaggggcaatgctcccgtcaagacgctggggcagcagcagcagggggaggtntggggaaagggggttcagaggcccagaacctcctgctggtattgggaggcaggaggtttagcatagcagctctccagccaggctcagccaaacccgggatggggactaagcgccaaggtccaagaagccgagcagaaccctgacatttggggccatcaggacanaggcacggcagctcccaagggcaaggggcacggccttngggacangggcacagcaac

SEQ ID NO: 37 - DNA, 336 bp, Homo sapiens
  5' terminal sequence. fibroblast growth factor receptor 4 (FGFR4) gene.
  modified_base (279): a, t, c or g
  modified_base (303): a, t, c or g
atcggatggaccgacccccacactgccccccagagctgtacgggctgatgcgtgagtgctggcagcagcgccctcccagaggcctaccttcaagcagctggtggaggcgctggacaaggtctgctggccgtctctgaggagtacctcgacctccgcctgaccttcggaccctattccccctctggtggggaacgccagcagcacctgcttcctccagcgattctgtcttcagccacgaccccctgccattggggattcagctccttccctttgggtctnggggtgcagacatgagcaaggctnaagggttttgcaagggacatagggttggtgggc

SEQ ID NO: 38 - DNA, 3015 bp, Homo sapiens
  fibroblast growth factor receptor 4 (FGFR4) gene.
ccgaggagcgctcgggctgtctgcggaccctgccgcgtgcaggggtcgcggccggctggagctgggagtgaggcggcggaggagccaggtgaggaggagccaggaaggcagttggtgggaagtccagcttgggtccctgagagctgtgagaaggagatgcggctgctgctggccctgttgggggtcctgctgagtgtgcctgggcctccagtcttgtccctggaggcctctgaggaagtggagcttgagccctgcctggctcccagcctggagcagcaagagcaggagctgacagtagcccttgggcagcctgtgcggctgtgctgtgggcgggctgagcgtggtggccactggtacaaggagggcagtcgcctggcacctgctggccgtgtacggggctggaggggccgcctagagattgccagcttcctacctgaggatgctggccgctacctctgcctggcacgaggctccatgatcgtcctgcagaatctcaccttgattacaggtgactccttgacctccagcaacgatgatgaggaccccaagtcccatagggacctctcgaataggcacagttacccccagcaagcaccctactggacacacccccagcgcatggagaagaaactgcatgcagtacctgcggggaacaccgtcaagttccgctgtccagctgcaggcaaccccacgcccaccatccgctggcttaaggatggacaggcctttcatggggagaaccgcattggaggcattcggctgcgccatcagcactggagtctcgtgatggagagcgtggtgccctcggaccgcggcacatacacctgcctggtagagaacgctgtgggcagcatccgctataactacctgctagatgtgctggagcggtccccgcaccggcccatcctgcaggccgggctcccggccaacaccacagccgtggtgggcagcgacgtggagctgctgtgcaaggtgtacagcgatgcccagccccacatccagtggctgaagcacatcgtcatcaacggcagcagcttcggagccgacggtttcccctatgtgcaagtcctaaagactgcagacatcaatagctcagaggtggaggtcctgtacctgcggaacgtgtcagccgaggacgcaggcgagtacacctgcctcgcaggcaattccatcggcctctcctaccagtctgcctggctcacggtgctgccagaggaggaccccacatggaccgcagcagcgcccgaggccaggtatacggacatcatcctgtacgcgtcgggctccctggccttggctgtgctcctgctgctggccgggctgtatcgagggcaggcgctccacggccggcacccccgcccgcccgccactgtgcagaagctctcccgcttccctctggcccgacagttctccctggagtcaggctcttccggcaagtcaagctcatccctggtacgaggcgtgcgtctctcctccagcggccccgccttgctcgccggcctcgtgagtctagatctacctctcgacccactatgggagttcccccgggacaggctggtgcttgggaagcccctaggcgagggctgctttggccaggtagtacgtgcagaggcctttggcatggaccctgcccggcctgaccaagccagcactgtggccgtcaagatgctcaaagacaacgcctctgacaaggacctggccgacctggtctcggagatggaggtgatgaagctgatcggccgacacaagaacatcatcaacctgcttggtgtctgcacccaggaagggcccctgtacgtgatcgtggagtgcgccgccaagggaaacctgcgggagttcctgcgggcccggcgccccccaggccccgacctcagccccgacggtcctcggagcagtgaggggccgctctccttcccagtcctggtctcctgcgcctaccaggtggcccgaggcatgcagtatctggagtcccggaagtgtatccaccgggacctggctgcccgcaatgtgctggtgactgaggacaatgtgatgaagattgctgactttgggctggcccgcggcgtccaccacattgactactataagaaaaccagcaacggccgcctgcctgtgaagtggatggcgcccgaggccttgtttgaccgggtgtacacacaccagagtgacgtgtggtcttttgggatcctgctatgggagatcttcaccctcgggggctccccgtatcctggcatcccggtggaggagctgttctcgctgctgcgggagggacatcggatggaccgacccccacactgccccccagagctgtacgggctgatgcgtgagtgctggcacgcagcgccctcccagaggcctaccttcaagcagctggtggaggcgctggacaaggtcctgctggccgtctctgaggagtacctcgacctccgcctgaccttcggaccctattccccctctggtggggacgccagcagcacctgctcctccagcgattctgtcttcagccacgaccccctgccattgggatccagctccttccccttcgggtctggggtgcagacatgagcaaggctcaaggctgtgcaggcacataggctggtggccttgggccttggggctcagccacagcctgacacagtgctcgaccttgatagcatggggcccctggcccagagttgctgtgccgtgtccaagggccgtgcccttgcccttggagctgccgtgcctgtgtcctgatggcccaaatgtcagggttctgctcggcttcttggaccatggcgcttagtccccatcccgggtttggctgagcctggctggagagctgctatgctaaacctcctgcctcccaataccagcaggaggttctgggcctctgaaccccctttccccacacctccccctgctgctgctgccccagcgtcttgacgggagcattggcccctgagcccagagaagctggaagcctgccgaaaacaggagcaaatggcgttttataaattatttttttgaaataaa

SEQ ID NO: 39 - DNA, 252 bp, Homo sapiens
  3' terminal sequence. ectonucleotide pyrophosphatase/phosphodiesterase 2 (autotaxin) (ENPP2) gene.
  modified_base (167): a, t, c or g
  modified_base (229): a, t, c or g
  modified_base (239): a, t, c or g
  modified_base (247): a, t, c or g
gtgtgatttattatgtttaagattggtttataaggcttaaatatatctgtcatagttaacagttaacagcaaataaaggcaactttacaaaatcagtgtttccatacagtacaggactaaatgtggcaactgtgcattggaaaattaatatttcctcaatgcaaatntcaaatctgcagcaccatttagaagcttccactaaaaactcaagctgcagtatttattacangctctactcngaacacanggcta

SEQ ID NO: 40 - DNA, 382 bp, Homo sapiens
  5' terminal sequence. ectonucleotide pyrophosphatase/phosphodiesterase 2 (autotaxin) (ENPP2) gene.
  modified_base (3): a, t, c or g
  modified_base (6): a, t, c or g
  modified_base (17): a, t, c or g
  modified_base (18): a, t, c or g
  modified_base (317): a, t, c or g
  modified_base (333): a, t, c or g
  modified_base (349): a, t, c or g
  modified_base (366): a, t, c or g
  modified_base (379): a, t, c or g
ctnacnttcaaacgganntggaattatttccaaagggtattggtgaagaaatatgcttcggaaagaaatggagttaacgtgataagtggaccaatcttcgactatgactatgatggcttacatgacacagaagacaaaataaaacagtacgtggaaggcagttccattcctgttccaactcactactacagcatcatcaccagctgtctggattttactcagcctgccgacaagtgtgacggccctctctctgtgtcctccttcatcctgcctcaccggcctgacaacgaggagagctgcaatagctcagaggacgnattcaaaatgggtagnaggaactcatgaaggntgcacacagctagggtncgttgacctttgnacc

SEQ ID NO: 41 - DNA, 2592 bp, Homo sapiens
  ectonucleotide pyrophosphatase/phosphodiesterase 2 (autotaxin) (ENPP2) gene.
atggcaaggaggagctcgttccagtcgtgtcagataatatccctgttcacttttgccgttggagtcaatatctgcttaggattcactgcacatcgaattaagagagcagaaggatgggaggaaggtcctcctacagtgctatcagactccccctggaccaacatctccggatcttgcaagggcaggtgctttgaacttcaagaggctggacctcctgattgtcgctgtgacaacttgtgtaagagctataccagttgctgccatgactttgatgagctgtgtttgaagacagcccgtgcgtgggagtgtactaaggacagatgtggggaagtcagaaatgaagaaaatgcctgtcactgctcagaggactgcttggccaggggagactgctgtaccaattaccaagtggtttgcaaaggagagtcgcattgggttgatgatgactgtgaggaaataaaggccgcagaatgccctgcagggtttgttcgccctccattaatcatcttctccgtggatggcttccgtgcatcatacatgaagaaaggcagcaaagtcatgcctaatattgaaaaactaaggtcttgtggcacacactctccctacatgaggccggtgtacccaactaaaacctttcctaacttatacactttggccactgggctatatccagaatcacatggaattgttggcaattcaatgtatgatcctgtatttgatgccacttttcatctgcgagggcgagagaaatttaatcatagatggtggggaggtcaaccgctatggattacagccaccaagcaaggggtgaaagctggaacattcttttggtctgttgtcatccctcacgagcggagaatattaaccatattgcagtggctcaccctgccagatcatgagaggccttcggtctatgccttctattctgagcaacctgatttctctggacacaaatatggccctttcggccctgagatgacaaatcctctgagggaaatcgacaaaattgtggggcaattaatggatggactgaaacaactaaaactgcatcggtgtgtcaacgtcatctttgtcggagaccatggaatggaagatgtcacatgtgatagaactgagttcttgagtaattacctaactaatgtggatgatattactttagtgcctggaactctaggaagaattcgatccaaatttagcaacaatgctaaatatgaccccaaagccattattgccaatctcacgtgtaaaaaaccagatcagcactttaagccttacttgaaacagcaccttcccaaacgtttgcactatgccaacaacagaagaattgaggatatccatttattggtggaacgcagatggcatgttgcaaggaaacctttggatgtttataagaaaccatcaggaaaatgctttttccagggagaccacggatttgataacaaggtcaacagcatgcagactgtttttgtaggttatggcccaacatttaagtacaagactaaagtgcctccatttgaaaacattgaactttacaatgttatgtgtgatctcctgggattgaagccagctcctaataatgggacccatggaagtttgaatcatctcctgcgcactaataccttcaggccaaccatgccagaggaagttaccagacccaattatccagggattatgtaccttcagtctgattttgacctgggctgcacttgtgatgataaggtagagccaaagaacaagttggatgaactcaacaaacggcttcatacaaaagggtctacagaagagagacacctcctctatgggcgacctgcagtgctttatcggactagatatgatatcttatatcacactgactttgaaagtggttatagtgaaatattcctaatgccactctggacatcatatactgtttccaaacaggctgaggtttccagcgttcctgaccatctgaccagttgcgtccggcctgatgtccgtgtttctccgagtttcagtcagaactgtttggcctacaaaaatgataagcagatgtcctacggattcctctttcctccttatctgagctcttcaccagaggctaaatatgatgcattccttgtaaccaatatggttccaatgtatcctgctttcaaacgggtctggaattatttccaaagggtattggtgaagaaatatgcttcggaaagaaatggagttaacgtgataagtggaccaatcttcgactatgactatgatggcttacatgacacagaagacaaaataaaacagtacgtggaaggcagttccattcctgttccaactcactactacagcatcatcaccagctgtctggatttcactcagcctgccgacaagtgtgacggccctctctctgtgtcctccttcatcctgcctcaccggcctgacaacgaggagagctgcaatagctcagaggacgaatcaaaatgggtagaagaactcatgaagatgcacacagctagggtgcgtgacattgaacatctcaccagcctggacttcttccgaaagaccagccgcagctacccagaaatcctgacactcaagacatacctgcatacatatgagagcgagatttaa

SEQ ID NO: 42 - DNA, 467 bp, Homo sapiens
  3' terminal sequence. v-rel avian reticuloendotheliosis viral oncogene homolog a (nuclear factor of kappa light polypeptide gene enhancer in b-cells 3 (p65)) (RELA) gene.
  modified_base (74): a, t, c or g
  modified_base (187): a, t, c or g
  modified_base (191): a, t, c or g
  modified_base (210): a, t, c or g
  modified_base (215): a, t, c or g
  modified_base (296): a, t, c or g
  modified_base (406): a, t, c or g
  modified_base (420): a, t, c or g
  modified_base (442): a, t, c or g
  modified_base (452): a, t, c or g
acagatttattagttcagagtagaaagagcaagagtccaagtgctttgattgttcagtaaaaactatgcctccngactggagagctgccagcctgctctcccccactcttaacaacttaccctactattaaggcacttgagaagagggagagcaaggaagtcccagaccaaaccccttctggatccngggngagagccagtgctgttgcntggtnttccttcagccatggttgagcaaggaaagagccggcagagacctctgtagggcaggaaggccagcccctcaaacgctggtnttagggcacaggggacaatgccagtgccatacaggggctggtatctgggggcgttattttgattaagctgtaatgaatccatgatgggaaggacacttgataaggctttntggggctcaaaggnctttacctccagcctgcttctntctctagggngagtacccagaagct

SEQ ID NO: 43 - DNA, 2444 bp, Homo sapiens
  v-rel avian reticuloendotheliosis viral oncogene homolog a (nuclear factor of kappa light polypeptide gene enhancer in b-cells 3 (p65)) (RELA) gene.
ggcacgaggcggggccgggtcgcagctgggcccgcggcatggacgaactgttccccctcatcttcccggcagagcagcccaagcagcggggcatgcgcttccgctacaagtgcgaggggcgctccgcgggcagcatcccaggcgagaggagcacagataccaccaagacccaccccaccatcaagatcaatggctacacaggaccagggacagtgcgcatctccctggtcaccaaggaccctcctcaccggcctcacccccacgagcttgtaggaaaggactgccgggatggcttctatgaggctgagctctgcccggaccgctgcatccacagtttccagaacctgggaatccagtgtgtgaagaagcgggacctggagcaggctatcagtcagcgcatccagaccaacaacaaccccttccaagttcctatagaagagcagcgtggggactacgacctgaatgctgtgcggctctgcttccaggtgacagtgcgggacccatcaggcaggcccctccgcctgccgcctgtcctttctcatcccatctttgacaatcgtgcccccaacactgccgagctcaagatctgccgagtgaaccgaaactctggcagctgcctcggtggggatgagatcttcctactgtgtgacaaggtgcagaaagaggacattgaggtgtatttcacgggaccaggctgggaggcccgaggctccttttcgcaagctgatgtgcaccgacaagtggccattgtgttccggacccctccctacgcagaccccagcctgcaggctcctgtgcgtgtctccatgcagctgcggcggccttccgaccgggagctcagtgagcccatggaattccagtacctgccagatacagacgatcgtcaccggattgaggagaaacgtaaaaggacatatgagaccttcaagagcatcatgaagaagagtcctttcagcggacccaccgacccccggcctccacctcgacgcattgctgtgccttcccgcagctcagcttctgtccccaagccagcaccccagccctatccctttacgtcatccctgagcaccatcaactatgatgagtttcccaccatggtgtttccttctgggcagatcagccaggcctcggccttggccccggcccctccccaagtcctgccccaggctccagcccctgcccctgctccagccatggtatcagctctggcccaggccccagcccctgtcccagtcctagccccaggccctcctcaggctgtggccccacctgcccccaagcccacccaggctggggaaggaacgctgtcagaggccctgctgcagctgcagtttgatgatgaagacctgggggccttgcttggcaacagcacagacccagctgtgttcacagacctggcatccgtcgacaactccgagtttcagcagctgctgaaccagggcatacctgtggccccccacacaactgagcccatgctgatggagtaccctgaggctataactcgcctagtgacagcccagaggccccccgacccagctcctgctccactgggggccccggggctccccaatggcctcctttcaggagatgaagacttctcctccattgcggacatggacttctcagccctgctgagtcagatcagctcctaagggggtgacgcctgccctccccagagcactggttgcaggggattgaagccctccaaaagcacttacggattctggtggggtgtgttccaactgcccccaactttgtggatgtcttccttggaggggggagccatattttattcttttattgtcagtatctgtatctctctctctttttggaggtgcttaagcagaagcattaacttctctggaaaggggggagctggggaaactcaaacttttcccctgtcctgatggtcagctcccttctctgtagggaactgtggggtcccccatccccatcctccagcttctggtactctcctagagacagaagcaggctggaggtaaggcctttgagcccacaaagccttatcaagtgtcttccatcatggattcattacagcttaatcaaaataacgccccagataccagcccctgtatggcactggcattgtccctgtgcctaacaccagcgtttgaggggctgccttcctgccctacagaggtctctgccggctctttccttgctcaaccatggctgaaggaaacagtgcaacagcactggctctctccaggatccagaaggggtttggtctggacttccttgctctcccctcttctcaagtgccttaatagtagggtaagttgttaagagtgggggagagcaggctggcagctctccagtcaggaggcatagtttttagtgaacaatcaaagcacttggactcttgctctttctactctgaactaataaagctgttgccaagctggacggcacgagctcgtgcc

SEQ ID NO: 44 - DNA, 381 bp, Homo sapiens
  5' terminal sequence. il2-inducible t-cell kinase (ITK) gene.
  modified_base (312): a, t, c or g
  modified_base (335): a, t, c or g
  modified_base (348): a, t, c or g
  modified_base (355): a, t, c or g
  modified_base (371): a, t, c or g
  modified_base (379): a, t, c or g
aactctttcctttggttgtgctaagaggtgatgcccaaggtgcaccacctttcaagaactggatcatgaacaactttatcctcctggaagaacagctcatcaagaaatcccaacaagagaagaacttctccctcgaactttaaagtccgcttctttgtgttaaccaaagccagcctggcatactttgaagatcgtcatgggaagaagcgcacgctgaaggggtccattgagctctcccgaattcaaatgtgttgaggttgtgaaaagtgacatcagcatcccatgccactattaaatacccgttttcaggtnggtgcatgacaacttacctcctnttatggtgtttgnttccagntcgtgaggaggccggncagcgttngg

SEQ ID NO: 45 - DNA, 6381 bp, Homo sapiens
  il2-inducible t-cell kinase (ITK) gene.
cgcggccgctatatataatgcagcatcacaccatgtagggcatttactcttattttatacattcagatatgtttgaaacattcttaaggctacaaaacagaacatagaaaaataaacaggaatatattcaacacttacaaaaagtgatatgataaagaatataaagtactagtttccttttaacacttcaaaagatatgtatatatacttttttttacaagtaacatcacaaatgctcacatcttcacatgctcttaaagtattatttgtactcagtgtaaggctattatcgtttttcatacataaaattttctagctctgtaacacaatgcaatttttaatccattcagtaagttcaaccccaaagttgccgcttcccagcattaagacatgcacccacccctcttctaagattttctaaacttgtatttcggggagaaagacctcttttaaaaaataatccaattagtgggagagtaaatggctgacattagtagcaaaaccttagttatctgaaaataacatattggaaatgagacattattaggattttaaacaaacaatagcatttagacataaagtaggaagcaaaatacagtaaacagaaatagtgtagccaaatatcattctcttcagctaccttaagtaaaagacaaaacatttacctcatctaaaaatgaaggtaaaacgaaagaggcaaaaataaatattgctagtttctaggatggctgaatgttttctaaaccagaaatggttagaaaggaactttattgcaccaagtcaatcataagcaagtttgcagttcacaggcattttaattcaaccttgagtcacaaaggagaacaacacgctgcgagaatacagtctacagtctgcattaaataagaatatatcagcattgtggtctgggaaaacctatgcttgccaggacaaggcagggtgctgagcttaggtcatgccatgaaaatgaatttgtgggttatcagtaaacagtatgaggactacacagatgccagcatcctgctgccaaggagacatggggcaagagttgaagatttgagaggaaatgaagagacatacacaacaccaaaggaaaagggggctggaatcaagttcagccaaagcacctaacacaaaaaacaggtgagctttggtcagtctgttcttcaaaatatgtatgatcatatggtaatgaagtttcataatttccaactcaaaaatacaaatgatcctcagttctatacttttgcctctattctcttataaagaaatatgtcaacataacagtatgacataacagttaaaataaggacaaaagcttgcttatcttagtttgacctcagcataaggcaaaatcccctggagaatacatttaaaaacaaacttaaaaggaaaaaaagcgaaaccaacttcatgcaaagattccttttaaaactatcaaaagtcagttcttttattccagaggtcactgagaaaagtaccatctgctaaaattctctttcaagcacttcttccatcatatcctagaggtgagatatgggaaacagaaagcaaatcagtgttcctcaggagctatatctgttactcaattgagggtaagacaaagtgacaatgaagatatgagtagtatttccttccaatttttaaagattttcagaagctgagatcaaaccccactcaataaaatgcaggagactagaagcaacaacttattttggactcctgagatcaaacacattgaactttcaaatctgggtgtttctatcaaaatgtgattttcataaaatcagtaagctagtcctacataaaaaagcatgagctgaaagtggaggaccctctatcttctcattccttaactgagccaccgatgttaagaaaaaaatggcttaagcggtaccttcaacaactattctagttaagaaggtgacaacaaattgaggccgcgaattcggcgaaaactctttcctttggttgtgctaagaggtgatgcccaaggtgcaccacctttcaagaactggatcatgaacaactttatcctcctggaagaacagctcatcaagaaatcccaacaaaagagaagaacttctccctcgaactttaaagtccgcttctttgtgttaaccaaagccagcctggcatactttgaagatcgtcatgggaagaagcgcacgctgaaggggtccattgagctctcccgaatcaaatgtgttgagattgtgaaaagtgacatcagcatcccatgccactataaatacccgtttcaggtggtgcatgacaactacctcctatatgtgtttgctccagatcgtgagagccggcagcgctgggtgctggcccttaaagaagaaacgaggaataataacagtttggtgcctaaatatcatcctaatttctggatggatgggaagtggaggtgctgttctcagctggagaagcttgcaacaggctgtgcccaatatgatccaaccaagaatgcttcaaagaagcctcttcctcctactcctgaagacaacaggcgaccactttgggaacctgaagaaactgtggtcattgccttatatgactaccaaaccaatgatcctcaggaactcgcactgcggcgcaacgaagagtactgcctgctggacagttctgagattcactggtggagagtccaggacaggaatgggcatgaaggatatgtaccaagcagttatctggtggaaaaatctccaaataatctggaaacctatgagtggtacaataagagtatcagccgagacaaagctgaaaaacttcttttggacacaggcaaagaaggagccttcatggtaagggattccaggactgcaggaacatacaccgtgtctgttttcaccaaggctgttgtaagtgagaacaatccctgtataaagcattatcacatcaaggaaacaaatgacaatcctaagcgatactatgtggctgaaaagtatgtgttcgattccatccctcttctcatcaactatcaccaacataatggaggaggcctgtggactcgactccggtatccagtttgttttgggaggcagaaagccccagttacagcagggctgagatacgggaaatgggtgatcgacccctcagagctcacttttgtgcaagagattggcagtgggcaatttgggttggtgcatctgggctactggctcaacaaggacaaggtggctatcaaaaccattcgggaaggggctatgtcagaagaggacttcatagaggaggctgaagtaatgatgaaactctctcatcccaaactggtgcagctgtatggggtgtgcctggagcaggcccccatctgcctggtgtttgagttcatggagcacggctgcctgtcagattatctacgcacccagcggggactttttgctgcagagaccctgctgggcatgtgtctggatgtgtgtgagggcatggcctacctggaagaggcatgtgtcatccacagagacttggctgccagaaattgtttggtgggagaaaaccaagtcatcaaggtgtctgactttgggatgacaaggttcgttctggatgatcagtacaccagttccacaggcaccaaattcccggtgaagtgggcatccccagaggttttctctttcagtcgctatagcagcaagtccgatgtgtggtcatttggtgtgctgatgtgggaagttttcagtgaaggcaaaatcccgtatgaaaaccgaagcaactcagaggtggtggaagacatcagtaccggatttcggttgtacaagccccggctggcctccacacacgtctaccagattatgaatcactgctggaaagagagaccagaagatcggccagccttctccagactgctgcgtcaactggctgaaattgcagaatcaggactttagtagagactgagtaccaggccacgggctcagatcctgaatggaggaaggatatgtcctcattccatagagcattagaagctgccaccagcccaggaccctccagaggcagcctggcctgtactcagtccctgagtcaccatggaagcagcatcctgaccacagctggcagtcaagccacagctggagggtcagccaccaagctgggagctgagccagaacaggagtgatgtctctgcccttcctctagcctcttgtcacatgtggtgcacaaacctcaacctgacagctttcagacagcattcttgcacttcttagcaacagagagagacatgacgtaagacccagattgctatttttattgttatttttcaacagtgaatctaaagtttatggttccagggactttttatttgacccaacaacacagtatcccaggatatggaggcaaggggaacaagagcatgagtgtttttccaagaaactggtgagttaagtaagattagagtgagtgtgctctgttgctgtgatgctgtcagccacagcttcctgccgtagagaatgatagagcagctgctcacacaggaggccggatatctgataagcagctttatgaggttttacagagtatgctgctacctctctccttgaagggagcatggcagacccattggatggattggggtgaacagttcaggtcccatgcttggagcattgggtatctgatgtctgcaccagaacaagagaacctctgacggtggagaaccatgtggtgtaagaagagatcttaggtctcttctttataccaagctcatgttttataccaagctcatcttttataccaagctgtgcaggtgactatgcctcctcttctgcacagaatgcttccaccagcatcctgagaagaaatgattacttctgtaaaacatccttttttccagcctctgggaatcagcccccccctctctgcactatccgatcctcatcaacagagggcagcattgtgttggtcagtgttcccttggcgagcaattgaaacttgtttaggccctagggttgagcaattttaaggttgagactccaagtctcctaaaattctaggagagaaataaagagtctgtttttgctcaaaccatcaggatggaaacagtcaggcactgactggggtgcttccaagaggcatgagagtgcctactctggcttgagcacttctatatgcaaggtgaatatgtactgagctaggagacttccctgcaaaatctctgttcaccctgggttcacatccccatgaggtaatattattattcccattttacaaataatgtaactgaggctttaaaaagccaagacatctgcccaaagtgatggaactagaaagtctagagctggtattctagcccaaatctgtctgaccgcaatacacagattatttattcctattagacactggcttctactgaaaatgaaacttattgcagagggaataaatacaaagatggaaagccagtaaagaagtcagtatagaaccactagcgatagtgttgctctggcacagaccactgtggttgatgcatggccctccaacttggaataggattttccttttcctattctgtatccttaccttggtcatgttaatgactttggagttattcagttcctgaccctttaattctcacaaccaaccagtcatgttgcttgaagccattatagacgagcttcaaagcaactttaaaagattgttatgtagaagtatgagttcttcctttaattatcattccaactttcagctgtagtcttcttgaacacttatgaggagggaggacattccctgatataagagaggatggtgttgcaattggctctttctaaatcatgtgacgttttgactggcttgagattcagatgcataatttttaattattgtgaagtggagagcctcaagataaaactctgtcattacgaagatgattttactcagcttatccaaaattatctctgtttactttttagaattttgtacattatcttttgggatccttaattagagatgatttctggaacattcagtctagaaagaaaacattggaattgactgatctctgtggtttggtttagaaaattcccctgtgcatggtattacctttttcaagctcagattcatctaatcctcaactgtacatgtgtacattcttcacctcctggtgccctatcccgcaaaatgggcttcctgcctgggtttttctcttctcacattttttaaatggtcccctgtgtttgtagagaactcccttatacagagttttggttctagttttatttcgtagattttgcattttgtaccttttgagactatgtatttatatttggatcagatgcatatttattaatgtacagtcactgctagtgttcaaaataaaaatgttacaaatacctgttatcctttgtagagcacacagagttaaaagttgaatatagcaatattaaagctgcattttaa

SEQ ID NO: 46 - DNA, 273 bp, Homo sapiens
  5' terminal sequence. tenascin xb (TNXB) gene.
  modified_base (6): a, t, c or g
  modified_base (187): a, t, c or g
  modified_base (265): a, t, c or g
ctgagntctcggtccgaggctttgaggagagtgagcctctcacaggcttcctcaccacggttcctgacggtcccacacagttgcgtgcactgaacttgaccgagggattcgccgtgctgcactggaagcccccccagaatcctgtggacacctatgacgtccaggtcacagcctggggccccggctntgcaggcggaggaccccaggcaggcgcggtggacttaccccctgcatgaccttgtccttccacatcaacttacaccgncacagtgc

SEQ ID NO: 47 - DNA, 13268 bp, Homo sapiens
  tenascin xb (TNXB) gene.
ggtcctccccttctcctcccctgctcgctgcagactccctcctcactgtcgctgccgagatccacagtcggttgtggctcagcccctgttgcaggggacaagtgagggagacttccctgtcctgccctgagacgccgccctcccggggttggggacagagcaggtgcagaggcactgcagctgctcggttgcccagcctcctgaatgatgccagcccagtatgctctaacctccagcctggttctcctggtgctgctgagcacagccagagcaggccccttctcttcacggtccaatgtgacactgccagccccccggccccctccccagccagggggccacacagtgggggctggagtgggaagcccctcttctcagctttacgagcacacagtggaaggaggggagaagcaggtggtattcacccaccgcattaacctgcccccttccactggctgtggctgtcccccaggcaccgagcccccagtccttgcttcagaggtacaggccctgagggtccgtctagagatcctggaggagttggtgaaggggctcaaggaacagtgcactgggggatgttgtcctgcctctgcccaagctggcacaggtcagacagatgtgcggaccctctgcagtctccatggtgtgtttgatctgagccgctgcacctgttcctgtgagccaggctggggtgggcccacctgctcagaccccacagatgctgagatccctccctcttccccaccctcagcctcggggtcctgcccagatgactgcaatgatcagggtcgctgtgtccgtggtcgttgcgtgtgctttcccggctacactggccccagctgtggctggccatcctgtcccggggactgccaaggccgtgggcgctgcgtgcagggcgtgtgtgtgtgccgggcaggcttctcaggccccgactgcagccagcgctcctgccctcgaggttgcagccagaggggacgctgtgagggtgggcgctgcgtgtgtgacccaggctacactggtgacgactgtggcatgaggagctgccctcgcggttgcagtcagagggggcgctgtgagaatgggcgctgcgtgtgtaaccccggctacactggcgaggactgtggggtgaggagctgccctcggggctgcagccagcggggacgctgcaaggacgggcgctgcgtgtgtgaccccggctacactggcgaggactgtggtacgcggagctgcccctgggactgtggcgagggcgggcgctgcgtggacggccgctgcgtgtgctggcccgggtacacaggcgaggactgcagcacgcggacatgtccgagggactgccggggccgcgggcgctgcgaggacggcgaatgcatttgcgacacgggctacagcggggacgactgcggcgtgcgcagctgccctggcgactgcaaccaaaggggccgctgcgaggacggccgctgcgtgtgctggccggggtacactggaaccgattgcggctcgcgcgcctgcccacgcgactgtagaggtcgcgggcgctgcgagaacggcgtgtgtgtttgcaatgcgggctacagcggcgaggactgcggtgtgcgcagctgtcctggggactgtcgtggccggggccgctgtgagagtggccgctgcatgtgttggccggggtacacaggccgggactgcggcacgcgcgcctgtcctggcgactgtcgcgggcgcgggcgctgcgtggatggccgctgcgtgtgcaacccgggcttcaccggtgaggactgtgggagccgtcgctgtcccggggactgccgtgggcacggcctttgcgaggatggcgtgtgcgtgtgtgacgcaggctactcaggggaagactgcagcacgcgcagctgccccgggggctgccgaggccgcggccagtgcctagatgggcggtgtgtgtgcgaggacggctactctggcgaggattgcggtgtgaggcagtgcccgaatgactgcagccagcacggcgtgtgccaggacggtgtgtgcatctgttgggaaggctacgtgagtgaggactgcagcatccgcacctgcccctccaactgccacgggaggggccgctgtgaggaagggcgctgcctgtgcgacccaggctacaccggccctacctgtgccacccgcatgtgcccggctgactgccggggacgtgggcggtgtgtgcaaggagtgtgcctgtgccacgtgggctatggcggtgaggactgcgggcaggaagagcctccagccagcgcctgccctggaggctgcgggccccgggaactgtgccgggcaggccagtgtgtgtgtgtagagggcttccgaggccctgactgtgccatccagacatgcccaggggactgccgtggccgaggagagtgtcacgatggcagctgtgtctgcaaagatgggtatgctggcgaagactgcggagaagcacgggttccaagctctgcctcagcctatgaccagagaggactggcccctggacaggagtaccaggtcactgtccgagcccttcgagggaccagctggggccttcctgcctccaagaccatcaccaccatgatcgatgggccccaggacctccgagtggtggctgtgacaccgacaacactggagcttggctggctgcgtccccaggctgaggtggaccgatttgtggtgtcctacgtcagtgccggcaaccagagggtgaggctggaagtgccccctgaagcagacgggacgctgctgactgacctgatgccaggcgtagaatatgtggtgactgtcacagcggagcggggccgggcagtcagctacccagcttctgtcagggccaacacagaggaaagggaggaggagtccccgcccaggccaagcctgtcccagcccccacggcggccttggggcaacctgacggccgagctgagccgtttccgcggcacggtgcaggacctggagcgccacctgcgggctcacggctacccactgcgggccaaccagacttacacgtcggtggcgcgccacatccatgaatacttgcagcggcaggtgctgggcagttccgccgatggcgcgcttctcgtgtctctcgacgggctccgcggccagttcgagcgcgtggtgctgcgctggcggcctcagccgcctgcagagggccccggcggtgagctgactgtgccgggcaccacgcgcaccgtcagcctgcccgacctcaggcccggcaccacctaccacgtggaggtccacggggtgcgggcggggcagacctccaagtcctacgccttcatcaccaccacaggcccctcgacgacgcaaggggcccaggctcctctcctgcagcagcgcccccaggagctgggagagttgagggtgctgggcagagatgagacagggcgcctccgtgtggtctggaccgcccagcctgacacctttgcctacttccaactgcgcatgcgggtgcccgaggggccgggggcacatgaggaagtgctgccaggggacgtccgccaggctctggtgcctccaccccctcctggaaccccgtatgagctgtcacttcatggggtccctcctgggggcaagccctctgaccccatcatctaccaaggcattatggacaaggatgaggagaagcctgggaagtcctcaggcccaccacgcctgggtgagctgacggtgacagacaggacctccgactccttgctcctgcgctggacggtccccgagggcgagtttgactccttcgtgatccagtacaaagacagggacgggcagccccaggtggtgcccgtggaaggaccccagcgctcggccgtcatcacctccctggatcctggccgcaagtacaaatttgtcctgtatgggtttgttggcaagaagaggcatggtccgctggtggctgaagccaagatcttgcctcagagtgacccaagtccagggactccaccccacctgggaaacctgtgggtgacagaccctaccccagattcactgcacctctcctggactgtccctgagggccagtttgacaccttcatggtccagtacagggacagggatggacggccccaggtggtacctgtggaagggcccgagcgttcatttgttgtctcctcactggaccctgaccacaagtacagattcactctgtttggaattgcgaacaagaagcggtatggccccctcacggccgatggcaccactgctccagagaggaaagaggagcccccccgccctgagttcctggagcagcccctcctgggggaactgacagtgaccggcgtgaccccagactccttgcgtctctcatggacagtggcccagggccccttcgactcattcatggtccagtacaaggatgcacaggggcagccccaggcagtgcctgttgcgggggatgagaatgaggttactgtccccggcctggatcccgaccggaagtataagatgaacctctacgggcttcgtggcaggcagcgtgtggggcccgagtctgtggtggccaagactgctcctcaggaggatgtggacgagacccccagccccacagaactgggcacggaggccccggagtcccccgaggagccgctcctgggggagctgacagtgacaggatcctcccctgattcgctgagcctcttctggaccgtcccccagggcagcttcgactctttcaccgtgcagtacaaggacagggatgggcggccccgggcggtgcgtgttgggggcaaggagagtgaggtcaccgtgggaggcctagagcccgggcacaagtacaagatgcacctgtacggcctccacgaggggcagcgcgtgggcccggtgtccgccgtgggcgtgacagccccacaacaagaagagacccctccagccactgagtccccgctggagccacgcctaggagagctgacagtgacagatgtgacccccaactctgtgggcctctcctggacagtccccgagggccagtttgactccttcatagtccagtacaaggacaaggacgggcagccccaggtggtgccggtggcggcagaccagcgagaggtcacagtctacaacctggagcctgagagaaaatataagatgaacatgtatggactacatgatgggcaacgcatgggccccctgtctgtggtcatcgtgacggccccagccacagaggcctccaagcctcccctggagccacgcctaggggagctgacagtgacggatataacccctgactctgtgggcctctcatggacagtccctgagggtgaattcgactcctttgtggttcagtacaaggacagggacgggcagccccaggtggtgcccgtggctgcagatcagcgggaggtcactatccctgacctggaaccctcccgcaagtacaagttcctgctctttgggatccaggatgggaaacgacgcagcccagtctctgtggaggcaaagacggttgcccgaggtgacgccagcccaggggccccaccccgccttggggagctgtgggtgacagaccccaccccagactcactgcgcctctcctggacggttcctgagggccagttcgactcttttgtggtccagttcaaggacaaagacgggccccaggtggtgcccgtggagggccatgagcgctctgtcactgtcacccctctggatgccggccgcaagtacagattcctcctctatggcctcctgggcaagaagcgccatggccctctcactgccgacggcaccacggaagcccggagtgctatggatgatactggaacaaagcgtcccccaaaaccccgtctgggggaggagctgcaggtgaccaccgtgacccagaactccgtgggcctctcctggacagtccctgagggccagtttgactcctttgtggtccagtacaaagacagggacgggcagccccaggtggtgcccgtggagggcagcctcagggaggtcagcgtgccgggcctggaccctgcccacaggtacaagctgctgctctacgggctgcaccacggcaagcgtgtgggccccatctcggccgtcgccattactgccggcagggaagaaacggaaactgagaccacggccccgacccctccagcgcctgagccccacctcggggagttgacagtggaggaggccacgtcacacaccctgcatctctcctggatggtgactgagggagaatttgactccttcgaaatccagtacacagatagagacgggcaactccaaatggtccgcataggaggtgaccggaatgacatcaccctctctggcctggaatccgaccacagatacctggtgaccctgtatggtttcagtgatgggaagcatgtaggtcctgtccatgtcgaggccctgacagtcccggaggaggagaagccttcagaacctcccaccgcaacccccgagccccccatcaagcctcgcctgggggagctgaccgtgacagatgccacccctgactccctcagcctgtcctggacagttcccgagggacagtttgaccacttcctggtccagtacaggaatggagatgggcagcccaaggcagtgagggtgccagggcacgaggaaggggtcaccatctcgggcctggagccagaccataaatacaagatgaacctgtacggcttccacggtggccagcgcatgggccctgtgtctgtcgtcggggtgacagaacccagcatggaggccccggagcccgctgaggagccactcctgggggagctaacagtgacaggatcctcccctgactcgctgagcctctcctggaccgtcccccagggccgcttcgactccttcaccgtgcagtacaaggacagggacgggcggccccaggtggtgcgtgttgggggcgaggagagtgaagtcaccgtggggggcctggagcctgggcgcaagtacaagatgcacctgtacggcctccacgaggggcggcgcgtgggcccagtgtctgctgtgggcgtcacggcccccgaagaggagtcccctgatgctcctcttgcaaagctgcgcctagggcagatgacagtgagagacatcacctccgactccctcagcctctcctggacagtccccgagggccagtttgaccatttcttggtccagtttaagaatggggacgggcagcccaaggcggtgcgggtgccgggacacgaggatggggtcaccatctcgggcctggagccagaccacaagtacaagatgaacctgtacggcttccacggtggccagcgcgtgggccccgtgtctgctgttggtttaactgcctcgacagaacctcccacccctgaaccccccatcaagcctcgcctggaggagctgaccgtgacagatgcgacccctgactccctcagcctgtcctggacggttcccgagggacagtttgaccacttcctggtccagtacaagaatggggatgggcagcccaaggcaacacgggtgccaggacatgaggacagggtcaccatctccggcctggagccagacaacaagtacaagatgaacctgtacggcttccacggtggccagcgtgtgggccccgtgtctgccatcggggtgacagaggaagagacccccagccccacagaacccagcatggaggccccggagccccctgaggagccgctcctgggggagctaacagtgacaggatcctcccctgactcgctgagcctctcctggaccgtcccccagggccgcttcgactccttcaccgtgcagtacaaggacagggacgggcggccccaggtggtgcgtgttgggggcgaggagagcgaggtcaccgtggggggcctggagcctgggcgcaaatacaagatgcacctgtacggcctccacgaggggcggcgtgtgggcccggtgtccaccgtgggcgtgactgccccacaagaggatgtggacgagacccccagccctacagaaccaggcacagaggccccagagccccccgaggagcctctcctgggggagctgacagtgacaggatcctcccctgactcgctgagcctttcctggaccgtcccccagggccgctttgactccttcaccgtgcagtacaaggacagggacgggcggccccaggcggtgcgtgttgggggccaggagagcaaggtcactgtgaggggcctggagcctgggcgcaagtacaagatgcacctgtacggcctccacgaggggcggcgcctaggcccggtgtctgccgtgggcgtcacagaggatgaagccgagaccacccaagcagtgcctaccatgacccctgagccccccatcaagcctcgcctgggggagctgaccatgacagatgccacccctgactccctcagcctgtcctggacggttcccgagggccagtttgaccacttcctggtccagtacaggaatggggatgggcagcccaaggcggtgcgggtgccggggcacgaggacggggtcaccatctcaggcctggagccagaccataaatacaagatgaacctgtacggcttccacggtggccagcgcgtgggccccatctctgtcattggggtgacggaggaagagacccccagccccacggaactcagcactgaggccccggagccccctgaggagccgctcctgggggagctgacagtgacaggatcctcccctgactcgctgagcctctcctggaccatcccccagggccacttcgactccttcaccgtgcagtacaaggacagggacgggcggccccaggtgatgcgtgtcaggggcgaggagagcgaggtcaccgtggggggcctggagcccgggcgcaaatacaagatgcacctgtacggcctccacgaggggcggcgtgtgggcccggtgtccaccgtgggtgtgacagtgcccaccacaacccctgagccccccaacaagcctcgcctcggggagctgaccgtgacagatgccacccctgactccctcagcctgtcctggatggtccccgagggccagtttgaccacttcctggtccagtacaggaatggggatgggcagcccaaggtggtgcgggtgccggggcacgaggacggggtcaccatctcaggcctggagccagaccacaagtacaagatgaacctgtacggcttccacggtggccagcgcgtgggccccatctctgtcattggggtgacagaggaagaaactcccgcccccacagaacccagcacggaggccccggagccccctgaggagccgctcctgggggagctgacagtgacaggatcctcccctgactcgctgagcctctcctggaccatcccccagggccgcttcgactccttcactgtgcagtacaaggacagggacgggcggccccaggtggtgcgtgtcaggggcgaggagagcgaggtcaccgtggggggcctggagcccgggtgcaaatacaagatgcacctgtacggcctccacgaggggcagcgcgtgggcccagtgtccgctgtgggtgtgacagctccaaaggatgaagccgagaccacccaagcagtgcctaccatgacccctgagccccccatcaagcctcgcctgggggagctgaccgtgacagatgccacccccgactccctcagcctgtcctggatggttcccgagggccagtttgaccacttcctggtccagtacaggaatggggatgggcagcccaaggcggtgcgggtgccggggcacgaggacggggtcaccatctcaggcctggagccagaccataaatacaagatgaacctgtacggcttccacggtggccagcgcgtaggccctgtgtctgccattggggtgacggaggaagagacccccagccccacagaacccagcactgaggccccggaggcccctgaggagccgctcctgggggagttgacagtgacaggatcctcccctgactcgctgagcctctcctggaccgtcccccagggccgcttcgactccttcaccgtgcagtacaaggacagggacgggcagccccaggtggtgcgtgtcaggggcgaggagagcgaggtcaccgtggggggcctggagcccgggcgcaaatacaagatgcatctgtacggcctccacgaggggcagcgcgtgggcccagtgtccaccgtgggcatcacggcgcccctgcccacaccactgccggtggagccccgcctgggggagctggcggtggcggccgtgacctcggactcagtgggcctctcatggacggtggcccagggcccctttgactccttcctggtacagtacagggacgcgcaggggcagccccaggcagtgcctgtgagcggagacctccgagcggtcgccgtctcggggctggacccggcccgcaagtacaagttcctgctctttggactccagaatgggaaacgccacggcccagtccctgtggaggccaggaccgccccagacaccaaaccgtctccccgcctgggggagctgactgtgacagatgcgacccctgactccgtgggcctctcgtggacggtccctgagggcgaattcgactccttcgtggtccagtacaaggataaggatggtcggctccaggtggtgccggtggcagccaaccagcgggaggtcacagtccagggcctggagcccagtaggaaatacaggttcctgctctatggtctgtcaggcaggaaacgactgggccccatctctgctgacagcaccacagctcccctggagaaggagctacctccccacctgggggaactgaccgtggctgaggagacctccagctctctgcgcctgtcctggacggtagcccagggcccctttgactccttcgtggtccagtacagggacacggacgggcagcccagggcagtgcctgtggccgcagaccagcgcacagtcaccgtagaggacctggagcctggcaagaaatacaagtttctgctctacgggctccttgggggaaagcgcctgggcccggtctctgccctgggaatgacagccccagaagaggacacaccagccccagagttagccccagaggcccctgagcctcctgaagagccccgcctaggagtgctgaccgtgaccgacacaaccccagactccatgcgcctctcgtggagcgtggcccagggcccctttgattccttcgtggtccagtatgaggacacgaacgggcagccccaggccttgctcgtggacggcgaccagagcaagatcctcatctcaggcctggagcccagcaccccctacaggttcctcctctatggcctccatgaagggaagcgcctggggcccctctcagctgagggcaccacagggctggctcctgctggtcagacctcagaggagtcaaggccccgcctgtcccagctgtctgtgactgacgtgaccaccagttcactgaggctcaactgggaggccccaccgggggccttcgactccttcctgctccgctttggggttccatcaccaagcactctggagccgcatccgcgtccactgctgcagcgcgagctgatggtgccggggacgcggcactcggccgtgctccgggacctgcgttccgggactctgtacagcctgacactgtatgggctgcgaggaccccacaaggccgacagcatccagggaaccgcccgcaccctcagcccagttctggagagcccccgtgacctccaattcagtgaaatcagggagacctcagccaaggtcaactggatgcccccaccatcccgggcggacagcttcaaagtctcctaccagctggcggacggaggggagcctcagagtgtgcaggtggatggccaggcccggacccagaaactccaggggctgatcccaggcgctcgctatgaggtgaccgtggtctcggtccgaggctttgaggagagtgagcctctcacaggcttcctcaccacggttcctgacggtcccacacagttgcgtgcactgaacttgaccgagggattcgccgtgctgcactggaagcccccccagaatcctgtggacacctatgacgtccaggtcacagcccctggggccccgcctctgcaggcggagaccccaggcagcgcggtggactaccccctgcatgaccttgtcctccacaccaactacaccgccacagtgcgtggcctgcggggccccaacctcacttccccagccagcatcaccttcaccacagggctagaggcccctcgggacttggaggccaaggaagtgaccccccgcaccgccctgctcacttggactgagcccccagtccggcccgcaggctacctgctcagcttccacacccctggtggacagaaccaggagatcctgctcccaggagggatcacatctcaccagctccttggcctctttccctccacctcctacaatgcacggctccaggccatgtggggccagagcctcctgccgcccgtgtccacctctttcaccacgggtgggctgcggatccccttccccagggactgcggggaggagatgcagaacggagccggtgcctccaggaccagcaccatcttcctcaacggcaaccgcgagcggcccctgaacgtgttttgcgacatggagactgatgggggcggctggctggtgttccagcgccgcatggatggacagacagacttctggagggactgggaggactatgcccatggttttgggaacatctctggagagttctggctgggcaatgaggccctgcacagcctgacacaggcaggtgactactccatgcgcgtggacctgcgggctggggacgaggctgtgttcgcccagtacgactccttccacgtagactcggctgcggagtactaccgcctccacttggagggctaccacggcaccgcaggggactccatgagctaccacagcggcagtgtcttctctgcccgtgatcgggaccccaacagcttgctcatctcctgcgctgtctcctaccgaggggcctggtggtacaggaactgccactacgccaacctcaacgggctctacgggagcacagtggaccatcagggagtgagctggtaccactggaagggcttcgagttctcggtgcccttcacggaaatgaagctgagaccaagaaactttcgctccccagcggggggaggctgagctgctgcccacctctctcgcaccccagtatgactgccgagcactgaggggtcgccccgagagaagagccagggtccttcaccacccagccgctggaggaagccttctctgccagcgatctcgcagcactgtgtttacaggggggaggggaggggttcgtacaggagcaataaaggagaaactgaggtacccgg

SEQ ID NO: 48 - DNA, 438 bp, Homo sapiens
  3' terminal sequence. colony stimulating factor 1 (macrophage) (CSF1) gene.
  modified_base (134): a, t, c or g
  modified_base (206): a, t, c or g
ttttgcagcttgtgcacttcttttattattaaatatataagcagcttcctatcttttaaatagatatttaaatgactttatataaaataattcaccacttccaagtataaaaacaaaatctcacagtgcgtgancaatgtcctctcttgacttctcagagaacagaaggggttcctgagcaggtagcctggggggacaccagaggngcctctggggctcctcctgctctgatgccaccaagtgctcaaaaagagcttctgcagtggggttgggattgcttttttgacctttaaaatattatatgtttaaggtagggggggatgaaggggggaatgccctttttatttttcttcccattttaaaaatatgtgttttctaggcatccaaatatagggggctgtggcctgggagggctaggccccctttgccaggttcact

SEQ ID NO: 49 - DNA, 390 bp, Homo sapiens
  5' terminal sequence. colony stimulating factor 1 (macrophage) (CSF1) gene.
  modified_base (315): a, t, c or g
  modified_base (325): a, t, c or g
  modified_base (366): a, t, c or g
  modified_base (380): a, t, c or g
ggcacgaggcgagctctgactgaagatgggcctttgaaatataggtatgcacctgaggttgggggagggtctgcactcccaaaccccagcgcagtgtcctttccctgctgccgacagaacctggggctgagcaggttatccctgtcaggagccctgggactgggctgcatctcagccccacctggcatggtatccagctcccatccacttcttcacccttctttcctcctgaccttgggtcaacagtgatggaccttccaactcttcacccaccccctctaccattcacctctaaaccaggggaagccaggggtngggagagcantcagggagagccagggcttcagttttccaattgctggggangggcttccattttntggggccagc

SEQ ID NO: 50 - DNA, 2475 bp, Homo sapiens
  colony stimulating factor 1 (macrophage) (CSF1) gene.
agccgctctccgcatcccaggacagcggtgcggccctcggccggggcgcccactccgcagcacccagcgagcgagcgagcgagcgagggcggccgacgcgcccggccgggacccagctgcccgtatgaccgcgccgggcgccgccgggcgctgccctcccacgacatggctgggctccctgctgttgttggtctgtctcctggcgagcaggagtatcaccgaggaggtgtcggagtactgtagccacatgattgggagtggacacctgcagtctctgcagcggctgattgacagtcagatggagacctcgtgccaaattacatttgagtttgtagaccaggaacagttgaaagatccagtgtgctaccttaagaaggcatttctcctggtacaagacataatggaggacaccatgcgcttcagagataacacccccaatgccatcgccattgtgcagctgcaggaactctctttgaggctgaagagctgcttcaccaaggattatgaagagcatgacaaggcctgcgtccgaactttctatgagacacctctccagttgctggagaaggtcaagaatgtctttaatgaaacaaagaatctccttgacaaggactggaatattttcagcaagaactgcaacaacagctttgctgaatgctccagccaagatgtggtgaccaagcctgattgcaactgcctgtaccccaaagccatccctagcagtgacccggcctctgtctcccctcatcagcccctcgccccctccatggcccctgtggctggcttgacctgggaggactctgagggaactgagggcagctccctcttgcctggtgagcagcccctgcacacagtggatccaggcagtgccaagcagcggccacccaggagcacctgccagagctttgagccgccagagaccccagttgtcaaggacagcaccatcggtggctcaccacagcctcgcccctctgtcggggccttcaaccccgggatggaggatattcttgactctgcaatgggcactaattgggtcccagaagaagcctctggagaggccagtgagattcccgtaccccaagggacagagctttccccctccaggccaggagggggcagcatgcagacagagcccgccagacccagcaacttcctctcagcatcttctccactccctgcatcagcaaagggccaacagccggcagatgtaactggtaccgccttgcccagggtgggccccgtgaggcccactggccaggactggaatcacaccccccagaagacagaccatccatctgccctgctcagagaccccccggagccaggctctcccaggatctcatcaccgcgcccccagggcctcagcaacccctccaccctctctgctcagccacagctttccagaagccactcctcgggcagcgtgctgccccttggggagctggagggcaggaggagcaccagggatcggaggagccccgcagagccagaaggaggaccagcaagtgaaggggcagccaggcccctgccccgttttaactccgttcctttgactgacacacatgagaggcagtccgagggatcctccagcccgcagctccaggagtctgtcttccacctgctggtgcccagtgtcatcctggtcttgctggccgtcggaggcctcttgttctacaggtggaggcggcggagccatcaagagcctcagagagcggattctcccttggagcaaccagagggcagccccctcactcaggatgacagacaggtggaactgccagtgtagagggaattctaagacccctcaccatcctggacactctcgtttgtcaatgtccctctgaaaatgtgacgcccagccccggacacagtactccagatgttgtctgaccagctcagagagagtacagtgggactgttaccttccttgatatggacagtattcttctatttgtgcagattaagattgcattagtttttttcttaacaactgcatcatactgttgtcatatgttgagcctgtggtctataaaacccctagttccatttcccataaacttctgtcaagccagaccatctctaccctgtacttggacaacttaacttttttaaccaaagtgcagtttatgttcacctttgttaaagccaccttgtggtttctgcccatcacctgaacctactgaagttgtgtgaaatcctaattctgtcatctccgtagccctcccagttgtgcctcctgcacattgatgagtgcctgctgttgtctttgcccatgttgttgatgtagctgtgaccctattgttcctcacccctgccccccgccaaccccagctggcccacctcttccccctcccacccaagcccacagccagcccatcaggaagccttcctggcttctccacaaccttctgactgtcttttcagtcatgccccctgctcttttgtatttggctaatagtatatcaatttgcactt

SEQ ID NO: 51 - DNA, 397 bp, Homo sapiens
  3' terminal sequence. villin 2 (ezrin) (VIL2) gene.
  modified_base (4): a, t, c or g
  modified_base (171): a, t, c or g
  modified_base (316): a, t, c or g
  modified_base (384): a, t, c or g
  modified_base (393): a, t, c or g
atcngttgaatagttgattccatacatttccaggtcctgagcaatcttcaggtattccaacatagcattatctttgagcatcccacggtgttccgcatgccacacctggatccggtcctcccactggtccctggtaagtttgtgctggtccatcactctttgagggatcanccgctcagagctgaggtacccagacttgtgcacttctttgttgtagtccccaaacttggcctgcacagcgtagggaccccaagagcacggcagtctcagggggggcagtagatctcatcgctaagggattcctttccttcacttnggagggaggaaaagtttctggggtgatgtcctggggatgagcttccttcagccacatctttcaggggnaggactttnggcc

SEQ ID NO: 52 - DNA, 468 bp, Homo sapiens
  5' terminal sequence. villin 2 (ezrin) (VIL2) gene.
  modified_base (276): a, t, c or g
  modified_base (434): a, t, c or g
  modified_base (439): a, t, c or g
  modified_base (468): a, t, c or g
ggacgaggcagggcgggcgggcgctctaagggttctgctctgactccaggttgggacagcgtcttcgctgctgctggatagtcgtgttttcggggatcgaggatactcaccagaaaccgaaaatgccgaaaccaatcaatgtccgagttaccaccatggatgcagagctggagtttgcaatccagccaaatacaactggaaaacagctttttgatcaggtggtaaagactatcggcctccgggaagtgtggtactttggcctccactatgtggatnaataaaggatttcctacctgggctgaagctggataagaaggtgtctgcccaggaggtcaggaaggagaatcccctccagttcaagttccggggccaagttctaccctgaagatgtgggctgaggagctcattccagggacattcacccagaaattttntttcntccaagtgaaggaagggattcttaggcgn

SEQ ID NO: 53 - DNA, 3064 bp, Homo sapiens
  villin 2 (ezrin) (VIL2) gene.
  modified_base (2701): a, t, c or g
aggcagggcgggcgggcgctctaagggttctgctctgactccaggttgggacagcgtcttcgctgctgctggatagtcgtgttttcggggatcgaggatactcaccagaaaccgaaaatgccgaaaccaatcaatgtccgagttaccaccatggatgcagagctggagtttgcaatccagccaaatacaactggaaaacagctttttgatcaggtggtaaagactatcggcctccgggaagtgtggtactttggcctccactatgtggataataaaggatttcctacctggctgaagctggataagaaggtgtctgcccaggaggtcaggaaggagaatcccctccagttcaagttccgggccaagttctaccctgaagatgtggctgaggagctcatccaggacatcacccagaaacttttcttcctccaagtgaaggaaggaatccttagcgatgagatctactgcccccctgagactgccgtgctcttggggtcctacgctgtgcaggccaagtttggggactacaacaaagaagtgcacaagtctgggtacctcagctctgagcggctgatccctcaaagagtgatggaccagcacaaacttaccagggaccagtgggaggaccggatccaggtgtggcatgcggaacaccgtgggatgctcaaagataatgctatgttggaatacctgaagattgctcaggacctggaaatgtatggaatcaactatttcgagataaaaaacaagaaaggaacagacctttggcttggagttgatgcccttggactgaatatttatgagaaagatgataagttaaccccaaagattggctttccttggagtgaaatcaggaacatctctttcaatgacaaaaagtttgtcattaaacccatcgacaagaaggcacctgactttgtgttttatgccccacgtctgagaatcaacaagcggatcctgcagctctgcatgggcaaccatgagttgtatatgcgccgcaggaagcctgacaccatcgaggtgcagcagatgaaggcccaggcccgggaggagaagcatcagaagcagctggagcggcaacagctggaaacagagaagaaaaggagagaaaccgtggagagagagaaagagcagatgatgcgcgagaaggaggagttgatgctgcggctgcaggactatgaggagaagacaaagaaggcagagagagagctctcggagcagattcagagggccctgcagctggaggaggagaggaagcgggcacaggaggaggccgagcgcctagaggctgaccgtatggctgcactgcgggctaaggaggagctggagagacaggcggtggatcagataaagagccaggagcagctggctgcggagcttgcagaatacacagccaagattgccctcctggaagaggcgcggaggcgcaaggaggatgaagttgaagagtggcagcacagggccaaagaagcccaggatgacctggtgaagaccaaggaggagctgcacctggtgatgacagcacccccgcccccaccaccccccgtgtacgagccggtgagctaccatgtccaggagagcttgcaggatgagggcgcagagcccacgggctacagcgcggagctgtctagtgagggcatccgggatgaccgcaatgaggagaagcgcatcactgaggcagagaagaacgagcgtgtgcagcggcagctcgtgacgctgagcagcgagctgtcccaggcccgagatgagaataagaggacccacaatgacatcatccacaacgagaacatgaggcaaggccgggacaagtacaagacgctgcggcagatccggcagggcaacaccaagcagcgcatcgacgagttcgaggccctgtaacagccaggccaggaccaagggcagaggggtgctcatagcgggcgctgccagccccgccacgcttgtctttagtgctccaagtctaggaactccctcagatcccagttcctttagaaagcagttacccaacagaaacattctgggctgggaaccagggaggcgccctggtttgttttccccagttgtaatagtgccaagcaggcctgattctcgcgattattctcgaatcacctcctgtgttgtgctgggagcaggactgattgaattacggaaaatgcctgtaaagtctgagtaagaaacttcatgctggcctgtgtgatacaagagtcagcatcattaaaggaaacgtggcaggacttccatctgtgccatacttgttctgtattcgaaatgagctcaaattgatttttttaatttctatgaaggatccatctttgtatatttacatgcttagaggggtgaaaattattttggaaattgagtctgaagcactctcgcacacacagtgattccctcctcccgtcactccacgcagctggcagagagcacagtgatcaccagcgtgagtggtggaggaggacacttggatatttttttagttcttttttttttggcttaacagttttagaatacattgtacttatacaccttattaatgatcagctatatactatttatatacaagtgataatacagatttgtaacattagttttaaaaagggaaagttttgttctgtatattttgttaccttttacagaataaaagaattacatatgaaaaaccctctaaaccatggcacttgatgtgatgtggcaggagggnagtggtggagctggacctgcctgctgcagctgcagtcacgtgtaaacaggattattattagtgttttatgcatgtaatggactatgcacacttttaattttgtcagattcacacatgccactatgagctttcagactccagctgtgaagagactctgtctgcttgtgtttgtttgcagtctctctctgccatggccttggcaggctgctggaaggcagcttgtggaggccgttggttccgcccactcattccttctcgtgcactgctttctccttcacagctaagatgccatgtgcaggtggattccatgccgcagacatgaaataaaagctttgcaaaggcaaagaaaaaaaaaaaaaaaaa

SEQ ID NO: 54 - DNA, 435 bp, Homo sapiens
  3' terminal sequence. adenomatosis polyposis coli (APC) gene.
  modified_base (234): a, t, c or g
  modified_base (273): a, t, c or g
  modified_base (299): a, t, c or g
  modified_base (385): a, t, c or g
  modified_base (393): a, t, c or g
  modified_base (404): a, t, c or g
  modified_base (417): a, t, c or g
tgcataaataccaatttttccctgatgtaagtttagtcagtttataatctagaaatgattgataacagcaatatatcatattttctatctgtagtgttcattattttaagacaagcaataattaaaggaagttgggatgggatgctactttaaatacatgtaaaacatactgtacaaacatacttggctttactatttttttcctaaccatcaagagtgcctcccaaaataagnccagtgaagacaaagtatactatcaaatatgggcttccnggaacaaaaaccctcttaacaagggntccaaaccctatttaccaaaattttcccggtcttttaaggtttccatttggaaaccaaaatgtctatatggccggttggtaattancatggggnttttcttgggnttccttcttcccncctctttttaaccggtgg

SEQ ID NO: 55 - DNA, 414 bp, Homo sapiens
  5' terminal sequence. adenomatosis polyposis coli (APC) gene.
  modified_base (280): a, t, c or g
  modified_base (296): a, t, c or g
  modified_base (312): a, t, c or g
  modified_base (369): a, t, c or g
  modified_base (374): a, t, c or g
  modified_base (379): a, t, c or g
  modified_base (389): a, t, c or g
agaaaatgaattttctcccacaaatagtacttctcagaccgtttcctcaggtgctacaaatggtgctgaatcaaagactctaatttatcaaatggcacctgctgtttctaaaacagaggatgtttgggtgagaattgaggactgtcccattaacaatcctagatctggaagatctcccacaggtaatactcccccggtgattgacagtgtttcagaaaaggcaaatccaaacattaaagattcaaaagataatcagggcaaaacaaaatgtggggtaatnggcagtgttcccatgncgtaccgtggggtttnggaaaatcgcctggaactcctttatttcaggtgggatgcccctgaccaaaaaggganctttnggttnaaaccggggncaaattattcctgttccctgttttc

SEQ ID NO: 56 - DNA, 10383 bp, Homo sapiens
  adenomatosis polyposis coli (APC) gene.
  modified_base (9089): a, t, c or g
  modified_base (9347): a, t, c or g
  modified_base (9453): a, t, c or g
  modified_base (9519): a, t, c or g
  modified_base (10205): a, t, c or g
attgaggactcggaaatgaggtccaagggtagccaaggatggctgcagcttcatatgatcagttgttaaagcaagttgaggcactgaagatggagaactcaaatcttcgacaagagctagaagataattccaatcatcttacaaaactggaaactgaggcatctaatatgaaggaagtacttaaacaactacaaggaagtattgaagatgaagctatggcttcttctggacagattgatttattagagcgtcttaaagagcttaacttagatagcagtaatttccctggagtaaaactgcggtcaaaaatgtccctccgttcttatggaagccgggaaggatctgtatcaagccgttctggagagtgcagtcctgttcctatgggttcatttccaagaagagggtttgtaaatggaagcagagaaagtactggatatttagaagaacttgagaaagagaggtcattgcttcttgctgatcttgacaaagaagaaaaggaaaaagactggtattacgctcaacttcagaatctcactaaaagaatagatagtcttcctttaactgaaaatttttccttacaaacagatatgaccagaaggcaattggaatatgaagcaaggcaaatcagagttgcgatggaagaacaactaggtacctgccaggatatggaaaaacgagcacagcgaagaatagccagaattcagcaaatcgaaaaggacatacttcgtatacgacagcttttacagtcccaagcaacagaagcagagaggtcatctcagaacaagcatgaaaccggctcacatgatgctgagcggcagaatgaaggtcaaggagtgggagaaatcaacatggcaacttctggtaatggtcagggttcaactacacgaatggaccatgaaacagccagtgttttgagttctagtagcacacactctgcacctcgaaggctgacaagtcatctgggaaccaaggtggaaatggtgtattcattgttgtcaatgcttggtactcatgataaggatgatatgtcgcgaactttgctagctatgtctagctcccaagacagctgtatatccatgcgacagtctggatgtcttcctctcctcatccagcttttacatggcaatgacaaagactctgtattgttgggaaattcccggggcagtaaagaggctcgggccagggccagtgcagcactccacaacatcattcactcacagcctgatgacaagagaggcaggcgtgaaatccgagtccttcatcttttggaacagatacgcgcttactgtgaaacctgttgggagtggcaggaagctcatgaaccaggcatggaccaggacaaaaatccaatgccagctcctgttgaacatcagatctgtcctgctgtgtgtgttctaatgaaactttcatttgatgaagagcatagacatgcaatgaatgaactagggggactacaggccattgcagaattattgcaagtggactgtgaaatgtacgggcttactaatgaccactacagtattacactaagacgatatgctggaatggctttgacaaacttgacttttggagatgtagccaacaaggctacgctatgctctatgaaaggctgcatgagagcacttgtggcccaactaaaatctgaaagtgaagacttacagcaggttattgcaagtgttttgaggaatttgtcttggcgagcagatgtaaatagtaaaaagacgttgcgagaagttggaagtgtgaaagcattgatggaatgtgctttagaagttaaaaaggaatcaaccctcaaaagcgtattgagtgccttatggaatttgtcagcacattgcactgagaataaagctgatatatgtgctgtagatggtgcacttgcatttttggttggcactcttacttaccggagccagacaaacactttagccattattgaaagtggaggtgggatattacggaatgtgtccagcttgatagctacaaatgaggaccacaggcaaatcctaagagagaacaactgtctacaaactttattacaacacttaaaatctcatagtttgacaatagtcagtaatgcatgtggaactttgtggaatctctcagcaagaaatcctaaagaccaggaagcattatgggacatgggggcagttagcatgctcaagaacctcattcattcaaagcacaaaatgattgctatgggaagtgctgcagctttaaggaatctcatggcaaataggcctgcgaagtacaaggatgccaatattatgtctcctggctcaagcttgccatctcttcatgttaggaaacaaaaagccctagaagcagaattagatgctcagcacttatcagaaacttttgacaatatagacaatttaagtcccaaggcatctcatcgtagtaagcagagacacaagcaaagtctctatggtgattatgtttttgacaccaatcgacatgatgataataggtcagacaattttaatactggcaacatgactgtcctttcaccatatttgaatactacagtgttacccagctcctcttcatcaagaggaagcttagatagttctcgttctgaaaaagatagaagtttggagagagaacgcggaattggtctaggcaactaccatccagcaacagaaaatccaggaacttcttcaaagcgaggtttgcagatctccaccactgcagcccagattgccaaagtcatggaagaagtgtcagccattcatacctctcaggaagacagaagttctgggtctaccactgaattacattgtgtgacagatgagagaaatgcacttagaagaagctctgctgcccatacacattcaaacacttacaatttcactaagtcggaaaattcaaataggacatgttctatgccttatgccaaattagaatacaagagatcttcaaatgatagtttaaatagtgtcagtagtagtgatggttatggtaaaagaggtcaaatgaaaccctcgattgaatcctattctgaagatgatgaaagtaagttttgcagttatggtcaatacccagccgacctagcccataaaatacatagtgcaaatcatatggatgataatgatggagaactagatacaccaataaattatagtcttaaatattcagatgagcagttgaactctggaaggcaaagtccttcacagaatgaaagatgggcaagacccaaacacataatagaagatgaaataaaacaaagtgagcaaagacaatcaaggaatcaaagtacaacttatcctgtttatactgagagcactgatgataaacacctcaagttccaaccacattttggacagcaggaatgtgtttctccatacaggtcacggggagccaatggttcagaaacaaatcgagtgggttctaatcatggaattaatcaaaatgtaagccagtctttgtgtcaagaagatgactatgaagatgataagcctaccaattatagtgaacgttactctgaagaagaacagcatgaagaagaagagagaccaacaaattatagcataaaatataatgaagagaaacgtcatgtggatcagcctattgattatagtttaaaatatgccacagatattccttcatcacagaaacagtcattttcattctcaaagagttcatctggacaaagcagtaaaaccgaacatatgtcttcaagcagtgagaatacgtccacaccttcatctaatgccaagaggcagaatcagctccatccaagttctgcacagagtagaagtggtcagcctcaaaaggctgccacttgcaaagtttcttctattaaccaagaaacaatacagacttattgtgtagaagatactccaatatgtttttcaagatgtagttcattatcatctttgtcatcagctgaagatgaaataggatgtaatcagacgacacaggaagcagattctgctaataccctgcaaatagcagaaataaaagaaaagattggaactaggtcagctgaagatcctgtgagcgaagttccagcagtgtcacagcaccctagaaccaaatccagcagactgcagggttctagtttatcttcagaatcagccaggcacaaagctgttgaattttcttcaggagcgaaatctccctccaaaagtggtgctcagacacccaaaagtccacctgaacactatgttcaggagaccccactcatgtttagcagatgtacttctgtcagttcacttgatagttttgagagtcgttcgattgccagctccgttcagagtgaaccatgcagtggaatggtaagtggcattataagccccagtgatcttccagatagccctggacaaaccatgccaccaagcagaagtaaaacacctccaccacctcctcaaacagctcaaaccaagcgagaagtacctaaaaataaagcacctactgctgaaaagagagagagtggacctaagcaagctgcagtaaatgctgcagttcagagggtccaggttcttccagatgctgatactttattacattttgccacggaaagtactccagatggattttcttgttcatccagcctgagtgctctgagcctcgatgagccatttatacagaaagatgtggaattaagaataatgcctccagttcaggaaaatgacaatgggaatgaaacagaatcagagcagcctaaagaatcaaatgaaaaccaagagaaagaggcagaaaaaactattgattctgaaaaggacctattagatgattcagatgatgatgatattgaaatactagaagaatgtattatttctgccatgccaacaaagtcatcacgtaaagcaaaaaagccagcccagactgcttcaaaattacctccacctgtggcaaggaaaccaagtcagctgcctgtgtacaaacttctaccatcacaaaacaggttgcaaccccaaaagcatgttagttttacaccgggggatgatatgccacgggtgtattgtgttgaagggacacctataaacttttccacagctacatctctaagtgatctaacaatcgaatcccctccaaatgagttagctgctggagaaggagttagaggaggagcacagtcaggtgaatttgaaaaacgagataccattcctacagaaggcagaagtacagatgaggctcaaggaggaaaaacctcatctgtaaccatacctgaattggatgacaataaagcagaggaaggtgatattcttgcagaatgcattaattctgctatgcccaaagggaaaagtcacaagcctttccgtgtgaaaaagataatggaccaggtccagcaagcatctgcgtcgtcttctgcacccaacaaaaatcagttagatggtaagaaaaagaaaccaacttcaccagtaaaacctataccacaaaatactgaatataggacacgtgtaagaaaaaatgcagactcaaaaaataatttaaatgctgagagagttttctcagacaacaaagattcaaagaaacagaatttgaaaaataattccaaggacttcaatgataagctcccaaataatgaagatagagtcagaggaagttttgcttttgattcacctcatcattacacgcctattgaaggaactccttactgtttttcacgaaatgattctttgagttctctagattttgatgatgatgatgttgacctttccagggaaaaggctgaattaagaaaggcaaaagaaaataaggaatcagaggctaaagttaccagccacacagaactaacctccaaccaacaatcagctaataagacacaagctattgcaaagcagccaataaatcgaggtcagcctaaacccatacttcagaaacaatccacttttccccagtcatccaaagacataccagacagaggggcagcaactgatgaaaagttacagaattttgctattgaaaatactccagtttgcttttctcataattcctctctgagttctctcagtgacattgaccaagaaaacaacaataaagaaaatgaacctatcaaagagactgagccccctgactcacagggagaaccaagtaaacctcaagcatcaggctatgctcctaaatcatttcatgttgaagataccccagtttgtttctcaagaaacagttctctcagttctcttagtattgactctgaagatgacctgttgcaggaatgtataagctccgcaatgccaaaaaagaaaaagccttcaagactcaagggtgataatgaaaaacatagtcccagaaatatgggtggcatattaggtgaagatctgacacttgatttgaaagatatacagagaccagattcagaacatggtctatcccctgattcagaaaattttgattggaaagctattcaggaaggtgcaaattccatagtaagtagtttacatcaagctgctgctgctgcatgtttatctagacaagcttcgtctgattcagattccatcctttccctgaaatcaggaatctctctgggatcaccatttcatcttacacctgatcaagaagaaaaaccctttacaagtaataaaggcccacgaattctaaaaccaggggagaaaagtacattggaaactaaaaagatagaatctgaaagtaaaggaatcaaaggaggaaaaaaagtttataaaagtttgattactggaaaagttcgatctaattcagaaatttcaggccaaatgaaacagccccttcaagcaaacatgccttcaatctctcgaggcaggacaatgattcatattccaggagttcgaaatagctcctcaagtacaagtcctgtttctaaaaaaggcccaccccttaagactccagcctccaaaagccctagtgaaggtcaaacagccaccacttctcctagaggagccaagccatctgtgaaatcagaattaagccctgttgccaggcagacatcccaaataggtgggtcaagtaaagcaccttctagatcaggatctagagattcgaccccttcaagacctgcccagcaaccattaagtagacctatacagtctcctggccgaaactcaatttcccctggtagaaatggaataagtcctcctaacaaattatctcaacttccaaggacatcatcccctagtactgcttcaactaagtcctcaggttctggaaaaatgtcatatacatctccaggtagacagatgagccaacagaaccttaccaaacaaacaggtttatccaagaatgccagtagtattccaagaagtgagtctgcctccaaaggactaaatcagatgaataatggtaatggagccaataaaaaggtagaactttctagaatgtcttcaactaaatcaagtggaagtgaatctgatagatcagaaagacctgtattagtacgccagtcaactttcatcaaagaagctccaagcccaaccttaagaagaaaattggaggaatctgcttcatttgaatctctttctccatcatctagaccagcttctcccactaggtcccaggcacaaactccagttttaagtccttcccttcctgatatgtctctatccacacattcgtctgttcaggctggtggatggcgaaaactcccacctaatctcagtcccactatagagtataatgatggaagaccagcaaagcgccatgatattgcacggtctcattctgaaagtccttctagacttccaatcaataggtcaggaacctggaaacgtgagcacagcaaacattcatcatcccttcctcgagtaagcacttggagaagaactggaagttcatcttcaattctttctgcttcatcagaatccagtgaaaaagcaaaaagtgaggatgaaaaacatgtgaactctatttcaggaaccaaacaaagtaaagaaaaccaagtatccgcaaaaggaacatggagaaaaataaaagaaaatgaattttctcccacaaatagtacttctcagaccgtttcctcaggtgctacaaatggtgctgaatcaaagactctaatttatcaaatggcacctgctgtttctaaaacagaggatgtttgggtgagaattgaggactgtcccattaacaatcctagatctggaagatctcccacaggtaatactcccccggtgattgacagtgtttcagaaaaggcaaatccaaacattaaagattcaaaagataatcaggcaaaacaaaatgtgggtaatggcagtgttcccatgcgtaccgtgggtttggaaaatcgcctgaactcctttattcaggtggatgcccctgaccaaaaaggaactgagataaaaccaggacaaaataatcctgtccctgtatcagagactaatgaaagttctatagtggaacgtaccccattcagttctagcagctcaagcaaacacagttcacctagtgggactgttgctgccagagtgactccttttaattacaacccaagccctaggaaaagcagcgcagatagcacttcagctcggccatctcagatcccaactccagtgaataacaacacaaagaagcgagattccaaaactgacagcacagaatccagtggaacccaaagtcctaagcgccattctgggtcttaccttgtgacatctgtttaaaagagaggaagaatgaaactaagaaaattctatgttaattacaactgctatatagacattttgtttcaaatgaaactttaaaagactgaaaaattttgtaaataggtttgattcttgttagagggtttttgttctggaagccatatttgatagtatactttgtcttcactggtcttattttgggaggcactcttgatggttaggaaaaaaatagtaaagccaagtatgtttgtacagtatgttttacatgtatttaaagtagcacccatcccaacttcctttaattattgcttgtcttaaaataatgaacactacagatagaaaatatgatatattgctgttatcaatcatttctagattataaactgactaaacttacatcagggaaaaattggtatttatgcaaaaaaaaatgtttttgtccttgtgagtccatctaacatcataattaatcatgtggctgtgaaattcacagtaatatggttcccgatgaacaagtttacccagcctgtttgcttnactgcatgaatgaaactgatggttcaatttcagaagtaatgattaacagttatgtggtcacatgatgtgcatagagatagctacagtgtaataatttacactattttgtgctccaaacaaaacaaaaatctgtgtaactgtaaaacattgaatgaaactattttacctgaactagattttatctgaaagtaggtagaatttttgctatgctgtaatttgttgtatattctggtatttgaggtgagatggctgctcttnattaatgagacatgaattgtgtctcaacagaaactaaatgaacatttcagaataaattattgctgtatgtaaactgttactgaaattggtatttgtttgaagggtnttgtttcacatttgtattaattaattgtttaaaatgcctcttttaaaagcttatataaattttttncttcagcttctatgcattaagagtaaaattcctcttactgtaataaaaacaattgaagaagactgttgccacttaaccattccatgcgttggcacttatctattcctgaaattcttttatgtgattagctcatcttgatttttaacatttttccacttaaacttttttttcttactccactggagctcagtaaaagtaaattcatgtaatagcaatgcaagcagcctagcacagactaagcattgagcataataggcccacataatttcctctttcttaatattatagaaattctgtacttgaaattgattcttagacattgcagtctcttcgaggctttacagtgtaaactgtcttgccccttcatcttcttgttgcaactgggtctgacatgaacactttttatcaccctgtatgttagggcaagatctcagcagtgaagtataatcagactttgccatgctcagaaaattcaaatcacatggaactttagaggtagatttaatacgattaagatattcagaagtatattttagaatccctgcctgttaaggaaactttatttgtggtaggtacagttctggggtacatgttaagtgtccccttatacagtggagggaagtcttccttcctgaaggaaaataaactgacacttattaactaagataatttacttaatatatctnccctgatttgttttaaaagatcagagggtgactgatgatacatgcatacatatttgttgaataaatgaaaatttatttttagtgataagattcatacactctgtatttggggagagaaaacctttttaagcatggtggggcactcagataggagtgaatacacctacctggtggtcat

SEQ ID NO: 57 - DNA, 404 bp, Homo sapiens
  5' terminal sequence. mucin 1, transmembrane (MUC1) gene.
  modified_base (329): a, t, c or g
  modified_base (339): a, t, c or g
  modified_base (378): a, t, c or g
aaacggaagcagcctctcgatataacctgacgatctcagacgtcagcgtgagtgatgtgccatttcctttctctgcccagtctggggctggggtgccaggctggggcatcgcgctgctggtgctggtctgtgttctggttgcgctggccattgtctatctcattgccttggctgtctgtcagtgccgccgaaagaactacgggcagctggacatctttccagcccgggatacctaccatcctatgagcgagtaccccacctaccacacccatggggcgctatgtgccccctaggcagtaccgatcgtagcccctatgagaaggtttttngcaggtaatnggttggcagcagctttttttacaaaaaacccaggcagtnggcagccatttttgtccaatttttag

SEQ ID NO: 58 - DNA, 1721 bp, Homo sapiens
  mucin 1, transmembrane (MUC1) gene.
gaattccctggctgcttgaatctgttctgccccctccccacccatttcaccaccaccatgacaccgggcacccagtctcctttcttcctgctgctgctcctcacagtgcttacagttgttacaggttctggtcatgcaagctctaccccaggtggagaaaaggagacttcggctacccagagaagttcagtgcccagctctactgagaagaatgctgtgagtatgaccagcagcgtactctccagccacagccccggttcaggctcctccaccactcagggacaggatgtcactctggccccggccacggaaccagcttcaggttcagctgccacctggggacaggatgtcacctcggtcccagtcaccaggccagccctgggctccaccaccccgccagcccacgatgtcacctcagccccggacaacaagccagccccgggctccaccgcccccccagcccacggtgtcacctcggccccggacaccaggccgcccccgggctccaccgcccccccagcccacggtgtcacctcggccccggacaccaggccgcccccgggctccaccgcgcccgcagcccacggtgtcacctcggccccggacaccaggccggccccgggctccaccgcccccccagcccatggtgtcacctcggccccggacaacaggcccgccttggcgtccaccgcccctccagtccacaatgtcacctcggcctcaggctctgcatcaggctcagcttctactctggtgcacaacggcacctctgccagggctaccacaaccccagccagcaagagcactccattctcaattcccagccaccactctgatactcctaccacccttgccagccatagcaccaagactgatgccagtagcactcaccatagcacggtacctcctctcacctcctccaatcacagcacttctccccagttgtctactggggtctctttctttttcctgtcttttcacatttcaaacctccagtttaattcctctctggaagatcccagcaccgactactaccaagagctgcagagagacatttctgaaatgtttttgcagatttataaacaagggggttttctgggcctctccaatattaagttcaggccaggatctgtggtggtacaattgactctggccttccgagaaggtaccatcaatgtccacgacgtggagacacagttcaatcagtataaaacggaagcagcctctcgatataacctgacgatctcagacgtcagcgtgagtgatgtgccatttcctttctctgcccagtctggggctggggtgccaggctggggcatcgcgctgctggtgctggtctgtgttctggttgcgctggccattgtctatctcattgccttggctgtctgtcagtgccgccgaaagaactacgggcagctggacatctttccagcccgggatacctaccatcctatgagcgagtaccccacctaccacacccatgggcgctatgtgccccctagcagtaccgatcgtagcccctatgagaaggtttctgcaggtaatggtggcagcagcctctcttacacaaacccagcagtggcagccacttctgccaacttgtaggggcacgtcgccctctgagctgagtggccagccagtgccattccactccactcagggctctctgggccagtcctcctgggagcccccaccacaacacttcccaggcatggaattcc

SEQ ID NO: 59 - DNA, 359 bp, Homo sapiens
  3' terminal sequence. insulin-like growth factor 2 (somatomedin a) (IGF2) gene.
  modified_base (289): a, t, c or g
  modified_base (309): a, t, c or g
  modified_base (331): a, t, c or g
ttagccaattgatttttttggtggttgttttttttaaagccaatttctgagcttttgtggggtgtttctaaaaagccaattagttttaagagggttgttgtgggggggggggaagggggttagtttaatgttttgattttttatgtgtggggataattggggataatttggggggagggtatgtgaagggtgtttaaagccaatcgattttgtacatgtttgaagatgctgctgtgcttcctcagcccgatggagggggccgaggagagtagcctgtttcggggaggcngggcacggggactgggtcangagaagccccagggggaccgtngaccccagagattttcgggatggaaccc

SEQ ID NO: 60 - DNA, 410 bp, Homo sapiens
  5' terminal sequence. insulin-like growth factor 2 (somatomedin a) (IGF2) gene.
  modified_base (106): a, t, c or g
  modified_base (231): a, t, c or g
  modified_base (281): a, t, c or g
  modified_base (295): a, t, c or g
  modified_base (314): a, t, c or g
  modified_base (315): a, t, c or g
  modified_base (317): a, t, c or g
  modified_base (318): a, t, c or g
  modified_base (336): a, t, c or g
  modified_base (340): a, t, c or g
  modified_base (354): a, t, c or g
  modified_base (366): a, t, c or g
  modified_base (373): a, t, c or g
  modified_base (380): a, t, c or g
  modified_base (400): a, t, c or g
gtcgacccctccgaccgtgcttccggacaacttccccagataccccgtgggcaagttcttccaatatgacacctgggaagcagtccacccagcgcctgcaggggcnctgcctgccctcctgcgtgcccgccggggtcacgtgctcgccaaggagctcgaggcgttcagggaggccaaacgtcaccgtcccctgattgctctacccacccaagaccccgcccacggggcgcnccccccagagatgggccagcaatcggaagtgagcaaaattgccgcaagtntttcagcccggcgncaccattccttgcagcttnntnnttgaaccacggagttttncttnaggtttccattccngaaaattttttnggttttncaagttncccttggggggttttttttntttgaaacca

SEQ ID NO: 61 - DNA, 1356 bp, Homo sapiens
  insulin-like growth factor 2 (somatomedin a) (IGF2) gene.
ttctcccgcaaccttcccttcgctccctcccgtcccccccagctcctagcctccgactccctccccccctcacgcccgccctctcgccttcgccgaaccaaagtggattaattacacgctttctgtttctctccgtgctgttctctcccgctgtgcgcctgcccgcctctcgctgtcctctctccccctcgccctctcttcggcccccccctttcacgttcactctgtctctcccactatctctgcccccctctatccttgatacaacagctgacctcatttcccgataccttttcccccccgaaaagtacaacatctggcccgccccagcccgaagacagcccgtcctccctggacaatcagacgaattctccccccccccccaaaaaaaaaagccatccccccgctctgccccgtcgcacattcggcccccgcgactcggccagagcggcgctggcagaggagtgtccggcaggagggccaacgcccgctgttcggtttgcgacacgcagcagggaggtgggcggcagcgtcgccggcttccagacaccaatgggaatcccaatggggaagtcgatgctggtgcttctcaccttcttggccttcgcctcgtgctgcattgctgcttaccgccccagtgagaccctgtgcggcggggagctggtggacaccctccagttcgtctgtggggaccgcggcttctacttcagcaggcccgcaagccgtgtgagccgtcgcagccgtggcatcgttgaggagtgctgtttccgcagctgtgacctggccctcctggagacgtactgtgctacccccgccaagtccgagagggacgtgtcgacccctccgaccgtgcttccggacaacttccccagataccccgtgggcaagttcttccaatatgacacctggaagcagtccacccagcgcctgcgcaggggcctgcctgccctcctgcgtgcccgccggggtcacgtgctcgccaaggagctcgaggcgttcagggaggccaaacgtcaccgtcccctgattgctctacccacccaagaccccgcccacgggggcgcccccccagagatggccagcaatcggaagtgagcaaaactgccgcaagtctgcagcccggcgccaccatcctgcagcctcctcctgaccacggacgtttccatcaggttccatcccgaaaatctctcggttccacgtccccctggggcttctcctgacccagtccccgtgccccgcctccccgaaacaggctactctcctcggccccctccatcgggctgaggaagcacagcagcatcttcaaacatgtacaaaatcgattggctttaaacacccttcacataccctcccccc

SEQ ID NO: 62 - DNA, 473 bp, Homo sapiens
  3' terminal sequence. egf-like module containing, mucin-like, hormone receptor-like sequence 1 (EMR1) gene.
  modified_base (9): a, t, c or g
  modified_base (204): a, t, c or g
  modified_base (401): a, t, c or g
  modified_base (422): a, t, c or g
  modified_base (431): a, t, c or g
  modified_base (451): a, t, c or g
tttaggagnaaatcagtcagacaggcgacaaatcatttattgagaggttctctgtgtcaggcgtatgataggcgctggaggggcacgcttagaaccatgcaccaacaagggcaggagaaaacaaaatggtagccaggtgttcttggtcatgccattgaatttgggtctgttctcagaaactctggaattgaagaagttgcaganaccgaagataaaatggtcgtttggagcagaaacacctgatttctcatcagtgcatacaaccacaggaagacggcccccaacattcttccccagagggttctggggctgggtggggatccctcatttcccatgttaagcttgaggaagagatttcagggtaggctccctgcagggaaactacttgtccctcaactttnggcctcccatagcatattttnaaagccagnaagggctttttaaccccttntttgggaagcccgattggcatt

SEQ ID NO: 63 - DNA, 457 bp, Homo sapiens
  5' terminal sequence. egf-like module containing, mucin-like, hormone receptor-like sequence 1 (EMR1) gene.
  modified_base (305): a, t, c or g
  modified_base (332): a, t, c or g
  modified_base (351): a, t, c or g
  modified_base (362): a, t, c or g
  modified_base (370): a, t, c or g
  modified_base (380): a, t, c or g
  modified_base (399): a, t, c or g
  modified_base (411): a, t, c or g
  modified_base (416): a, t, c or g
  modified_base (425): a, t, c or g
  modified_base (448): a, t, c or g
tctgctcaacggccaggtacgagaagaatacaagaggtggatcactgggaagacgaagcccagctcccagtcccagacctcaaggatcttgctgtcctccatgccatccgcttccaagacgggttaaagtcctttcttgctttcaaatatgctatggagccacagttgaggacagtagtttcctgcaggagcctaccctgaaatctcttctcagcttaacatgggaaatgaggatcccaccagccccaggaaccctctgggggaaggaatgttggggggccgtcttcctgtgggttgtattgcantgatggaggaaatcaggtgttttttgntccaaacggaccattttantctttcgtggntttgcaanttttttcaanttccagagttttttgaggnacaggacccaanttcantgggcatgnaccaggaacatcggggttaaccntttttgttt

SEQ ID NO: 64 - DNA, 3149 bp, Homo sapiens
  egf-like module containing, mucin-like, hormone receptor-like sequence 1 (EMR1) gene.
ctaaagtttttttctttgaatgacagaactacagcataatgcgtggcttcaacctgctcctcttctggggatgttgtgttatgcacagctgggaagggcacataagacccacacggaaaccaaacacaaagggtaataactgtagagacagtaccttgtgcccagcttatgccacctgcaccaatacggtggacagttactattgcacttgcaaacaaggcttcctgtccagcaatgggcaaaatcacttcaaggatccaggagtgcgatgcaaagatattgatgaatgttctcaaagcccccagccctgtggtcctaactcatcctgcaaaaacctgtcagggaggtacaagtgcagctgtttagatggtttctcttctcccactggaaatgactgggtcccaggaaagccgggcaatttctcctgtactgatatcaatgagtgcctcaccagcagggtctgccctgagcattctgactgtgtcaactccatgggaagctacagttgcagctgtcaagttggattcatctctagaaactccacctgtgaagacgtgaatgaatgtgcagatccaagagcttgcccagagcatgcaacttgtaataacactgttggaaactactcttgtttctgcaacccaggatttgaatccagcagtggccacttgagttgccagggtctcaaagcatcgtgtgaagatattgatgaatgcactgaaatgtgccccatcaattcaacatgcaccaacactcctgggagctacttttgcacctgccaccctggctttgcaccaagcagtggacagttgaatttcacagaccaaggagtggaatgtagagatattgatgagtgccgccaagatccatcaacctgtggtcctaattctatctgcaccaatgccctgggctcctacagctgtggctgcattgtaggctttcatcccaatccagaaggctcccagaaagatggcaacttcagctgccaaagggttctcttcaaatgtaaggaagatgtgatacccgataataagcagatccagcaatgccaagagggaaccgcagtgaaacctgcatatgtctccttttgtgcacaaataaataacatcttcagcgttctggacaaagtgtgtgaaaataaaacgaccgtagtttctctgaagaatacaactgagagctttgtccctgtgcttaaacaaatatccatgtggactaaattcaccaaggaagagacgtcctccctggccacagtcttcctggagagtgtggaaagcatgacactggcatctttttggaaaccctcagcaaatgtcactccggctgttcgggcggaatacttagacattgagagcaaagttatcaacaaagaatgcagtgaagagaatgtgacgttggacttggtagccaagggggataagatgaagatcgggtgttccacaattgaggaatctgaatccacagagaccactggtgtggcttttgtctcctttgtgggcatggaatcggttttaaatgagcgcttcttccaagaccaccaggctcccttgaccacctctgagatcaagctgaagatgaattctcgagtcgttgggggcataatgactggagagaagaaagacggcttctcagatccaatcatctacactctggagaacgttcagccaaagcagaagtttgagaggcccatctgtgtttcctggagcactgatgtgaagggtggaagatggacatcctttggctgtgtgatcctggaagcttctgagacatataccatctgcagctgtaatcagatggcaaatcttgccgttatcatggcgtctggggagctcacgatggacttttccttgtacatcattagccatgtaggcattatcatctccttggtgtgcctcgtcttggccatcgccacctttctgctgtgtcgctccatccgaaatcacaacacctacctccacctgcacctctgcgtgtgtctcctcttggcgaagactctcttcctcgccggtatacacaagactgacaacaagacgggctgcgccatcatcgcgggcttcctgcactaccttttccttgcctgcttcttctggatgctggtggaggctgtgatactgttcttgatggtcagaaacctgaaggtggtgaattacttcagctctcgcaacatcaagatgctgcacatctgtgcctttggttatgggctgccgatgctggtggtggtgatctctgccagtgtgcagccacagggctatggaatgcataatcgctgctggctgaatacagagacagggttcatctggagtttcttggggccagtttgcacagttatagtgatcaactcccttctcctgacctggaccttgtggatcctgaggcagaggctttccagtgttaatgccgaagtctcaacgctaaaagacaccaggttactgaccttcaaggcctttgcccagctcttcatcctgggctgctcctgggtgctgggcatttttcagattggacctgtggcaggtgtcatggcttacctgttcaccatcatcaacagcctgcagggggccttcatcttcctcatccactgtctgctcaacggccaggtacgagaagaatacaagaggtggatcactgggaagacgaagcccagctcccagtcccagacctcaaggatcttgctgtcctccatgccatccgcttccaagacgggttaaagcctttcttgctttcaaatatgctatggagccacagttgaggacagtagtttcctgcaggagcctaccctgaaatctcttctcagcttaacatggaaatgaggatcccaccagccccagaaccctctggggaagaatgttgggggccgtcttcctgtggttgtatgcactgatgagaaatcagacgtttctgctccaaacgaccattttatcttcgtgctctgcaacttcttcaattccagagtttctgagaacagacccaaattcaatggcatgaccaagaacacctggctaccattttgttttctcctgcccttgttggtgcatggttctaagcgtgcccctccagcgcctatcatacgcctgacacagagaacctctcaataaatgatttgtcgcctgtctgactgatttaccctaaaaaaaaaaaaaaaaaaaaaaaaaaaaaaa

SEQ ID NO: 65 - DNA, 412 bp, Homo sapiens
  3' terminal sequence. kiaa0427 gene product (KIAA0427) gene.
  modified_base (310): a, t, c or g
  modified_base (336): a, t, c or g
  modified_base (349): a, t, c or g
  modified_base (370): a, t, c or g
  modified_base (376): a, t, c or g
  modified_base (387): a, t, c or g
ttaatatcgactcggccaacatttacatttacatggatggacaggacgatccccaaacagtgaaggtttacagactggtcaaggaaggacgaacagagagaatggggtctgagggtgcacatcccgtggagggtggcggggctcctggcctcgtctgggtgaggttgggagcctcgctggggctgcggtcccagagcttcggcaaagccaccaggccttggggagcagggctttggcaagcaggccgcctcggagaaaaacaatgactaactcatcctgacagggcagttggggagactttaggacaggnttcaacattcagatgggcttggaccncctttttccattncggccaaggaaccccggggcnaggggngaaagcaattncaaagcctttaggaaatttcaattt

SEQ ID NO: 66 - DNA, 442 bp, Homo sapiens
  5' terminal sequence. kiaa0427 gene product (KIAA0427) gene.
  modified_base (391): a, t, c or g
  modified_base (401): a, t, c or g
  modified_base (409): a, t, c or g
  modified_base (416): a, t, c or g
  modified_base (426): a, t, c or g
atctgaacaacaacactttaagctgtttttctaaatgcaggttgctgctcctttttcagatatggaaggaaaacgttaagactattttttttttaaagaaacaacagtcaagcctaaaatttgagaccccgaggcagcttcccgagggagactgctcagacaggaactgcaggacagaagtggatgccccacagaccctgggccccctccccaagtccatcccctctctgtgggcatgaggaaggccgcgtccgagttgacctctgaatgtatgtgatgagaggcagagctgggatattgcatttcttaagggttgcattgcttttccccttcgcccgcgttctttggcgcatggaaggaggcggttccagccatcttgatgtttgatccngttttcagtnttccccanttgcctnttcagggatngagttagttcattttt

SEQ ID NO: 67 - DNA, 5737 bp, Homo sapiens
  kiaa0427 gene product (KIAA0427) gene.
gtcagatcagggatcattttttttccttcctctactccctcccccctacccgcccctccctccctgtttcccttccctccctccctcccctctctgctgggtctgtgcgctggggcgcccgatcccctccgcagctgggacgctccgaactcgaggcaggagtcggctctccggagcctcgtccctcccttccccttccctgcccccttcccccacccccgactcgggcttggcgcggcggccagaggaaccccgagtcccggcccaggcccctgagctggagggatggaaaactcctctgcagcatcagcctcctcggaggcagggagcagccgctcccaggagatcgaggagctggagcgcttcatcgacagctacgtgctggagtaccaggtgcaggggctgctggctgacaagacggagggtgatggcgagagcgagaggacccagtcccacatctcccagtggacagcggactgcagcgaaccgctggacagcagctgttccttctcccgagggcgagcccccccacagcagaatggcagcaaagacaactctctggacatgctgggcacggacatctgggcggccaacaccttcgattccttcagtggtgccacctgggacctgcagccggaaaagctggacttcacccagttccaccgcaaagtccgacacacgcccaagcagcccctgccacacatcgaccgcgaagggtgtggcaaagggaagctggaagatggggatggcatcaacctgaatgacatcgagaaggtccttccagcctggcagggctaccacccgatgccccatgaagtggagatcgcacacaccaagaagctgttccgcaggaggagaaatgatcgaaggcggcagcagagacctccggggggcaacaagccccaacagcatggtgaccaccagccaggcagtgccaaacacaacagggaccaccagaaatcctaccaggggggctcagcaccccacccctcagggaggcccactcaccatggctacagccagaaccggcgctggcaccatggcaacatgaagcacccaccaggcgacaagggggaggcaggcgcacaccgcaatgccaaagagaccatgaccatcgagaacccaaaactggaggacactgcaggggacaccgggcacagcagcctcgaggccccccgcagccctgacaccctggccccggtggcttctgagcggctgcccccacagcagtcaggggggccagaggttgagacaaaacgtaaagacagtattcttcccgagcgcatcggggagcggcccaaaattaccctgctccagtcttccaaagacagactgcggcgaaggctaaaggaaaaggatgaagtggccgtggagacgaccactccccagcagaacaagatggacaagctgatcgagatcctgaacagcatgcggaacaacagcagcgacgtggacaccaagctcaccaccttcatggaggaggcccagaactccaccaactccgaggagatgctgggcgagatcgtgcgcacaatctaccagaaggctgtgtccgaccgcagcttcgccttcaccgctgccaagctctgcgacaagatggcgctctttatggtggaggggaccaagttccggagcctgctcctcaacatgctgcagaaggacttcacggtgcgcgaggagctgcagcagcaggacgtggagcgctggctgggcttcatcaccttcctgtgtgaggtcttcggcaccatgcgcagcagcacaggcgagcccttccgtgtgctcgtgtgccccatctacacctgcctcagggagctcttgcaatctcaggatgtgaaggaagatgctgtcctttgctgctctatggagctgcagagtacaggccggctgctggaggaacagctgcctgagatgatgacagagctcctggccagcgcacgggacaagatgctgtgcccctcggagtccatgctgacccggtcgctgctcctagaggtcatcgagctccacgctaacagctggaaccctctgacgccccccatcacgcagtactacaacagaaccatccagaaactgacagcctgacagccagggggcctggcaggcggcccacgggcagctggggccctggtgcacagggccagatggacaggcgggaggacaggggtggccctggcgggagaaagaaatggggaggagggcaggcagagtcggtggccagtctggagccagacggggaagggagcaaatccctgagaggagtgcccccgcacaagccccccagcccgagcatgcaagctcacaccaataagggaagcatgtttctttttcctggtggccctggccctccccttcctcactcccgcctctcccctccccatcagacccatcccccacggagctttgtgtgagggatctcatcgctgtgactcctcggagaccttggcagcctcgcacgccggggcaccgcttgggtcagaaaggacctcggaaggctgaaaaagtgggtcggagacgggctcgcattgttcccgcatgctgtcagccgcagtcgccaactggcagcaggcgacgtgtagcagatgtccgggaggacaaaggcaggcacggtccccaccagccgcccgtaattgacggcctttgtcagccatggcagagctgacgctccacctcccacctccaagtcctcctcactgcagcccccacagcctcaggcctagggggtcaggcgcagcgggggagatggagtttgcagttccacttgcactcttttgtttattgtgttttatttttcaaaagtcggttgctttgaagtctctttggccaatgaaaatgcccgtgaggtgatcacacagtcagcactgttgaggacccccggattagtgggagatcaaacccagctcccctctagaagaaggattcgagccacagacagcttgccagtagccaattagggtaattggaaacttctgccccggcggggggtccccgctggaatcctgtgttcctcgccactggcttccagcgcctctgttttctcaaagggctgatactgtcaccactgggaccaagttaaacctggtcctggccccaggggccttgtggcaaacagggcacagaacgagactggcaaattaaaaccaaaattctagatggtgtcttgcgctccacacgcaggtcttactggggaaaaggatgggagtgggggctccccaggactcgattttagctaatgcgctgtgtcactgccccagctcggacgtagaagcccagccctccgtgagctcttgggaaaggggtgaattcactgggtcatggaagggacagtcaggtgaccagcggggtcgccagatgaagcttcccagccgggaaacaagacggggtttcttggcaggccctggtcctggggagcaggccctgttgttggctggagaggaaggtgtggggtggaacaggtgtccacatagctccatctctgggggctggagcacacactttgatgagcccccccggaaatgatgtcagagcctagccgcttccttatttgctcttttattgaggccgggcaggccctgggtcactttggaggcccctcttggtccacactggactggccgggaggtgatgggcggggaaggttctcgtgattgattgattctgagtctgagagtggcgagtggggagaggcttccccagttctctccagctttccctgcagctgcaacctgccctctggtcccaggtgtggagcctttgcctgtctctaaaaagagcctgttggcgacaaggtgtagggggcacaagtttacctgaaacaggtcagtggtctctcccaagaagcgcacgccacctctggtccctggccctgaaccctgccttcttcctccctccacggtttcttcccagactttctcaagctcctcctcactgcccttcctccccagcccagcctgggaacacagatgccccgcgggtaggaggcctcgagggaggagccgggctgatgcggggctgctcagggcaggccccagggcgagcttgccatcgtggccaggcagcctccacctgtgcttcagtggcccctgcccccctgaagcatgtggggtttgtccgctaggaggaggcaaggcccccgaagagaggagagacctgggagtgggagctcaggtcagggaggaggcaggggagtggggtctcccagacccaacggtgagctcagagcaagcttcacgcaggacgctccgaaacactgtgtggagggggctgtgttgtgggcaccttggggcctgattctccttcctccgaacgggctccttgatggcctggccacaggggcagctccccattggctgttaggaccagagtgtgaagaagaagtgaaatataaatatgtatacatatataaatatatttttaattacatgtcgtgtcacggtggctccagacatactgtttgcctagtttattccactgcttgaaagcgcttcctagccaatctgaacaacaacactttaagctgtttttctaaatgcaggttgctgctcctttttcagatatggaaggaaaacgttaagactattttttttttaaagaaacaacagtcaagcctaaaatttgagaccccgaggcagcttcccgagggagactgctcagacaggaactgcaggacagaagtggatgccccacagaccctggccccctccccaagtccatcccctctctgtggcatgaggaaggccgcgtccgagttgacctctgaatgtatgtgatgagaggcagagctggatattgcatttctaaggcttgcattgctttcccctcgcccgcggttcttggcgcatggaagaggcggtccagccatctgatgttgatcctgtctcagtctccccactgcctgtcaggatgagttagtcattgtttttctccgaggcggcctgcttgccacagccctgctccccaaggcctggtggctttgccgaagctctgggaccgcagccccagcgaggcccccaacctcacccagacgaggccaggagccccgccaccctccacgggatgtgcaccctcagaccccattctctctgttcgtccttccttgaccagtctgtaaaccttcactgtttggggatcgtcctgtccatccatgtaaatgtaaatgttggccgagtcggtatttattctgattgatttttattttattctattattttctccgagggatgagggtggggggtgtgggaagggtaccacagatcaggccggggcagctgtaggggcgggggcccagacagccaggccgccaccagagcagccccatggggtgccccagacgcgggcctccaagaagccaagtcccagtctgttttctggcatcagacaccggcccgtgttccttgtcagacagacagactctcaggcctgcctggggagtcgtgtccctcagctgcagggcactgtgttgggaaaccattggctgggcctttgaggacacagatcagaagaaagaaagacaactttcctctgcgcggaacactcacacggaagggctggccgcctccctgagccggctgggagtggacgacaggacctacctccccagagcaagggcctggggcttcccgccaaagctgccgcggaaccccgctagtgcgaccaccctccctccgtcggtatgtcctgctttccagctgaacccaaactacaagtgggtttaaaaaaaataaacaccaccaccaaaaac

SEQ ID NO: 68 - DNA, 377 bp, Homo sapiens
  3' terminal sequence. spleen tyrosine kinase (SYK) gene.
  modified_base (213): a, t, c or g
  modified_base (264): a, t, c or g
  modified_base (357): a, t, c or g
tctttctttctttccttaactggctacatgcttagaaactgcactggtcaaacttgattttctttttaaagcctcaaaacatttttattgtcaggaaagcttttcagtggccagggatcagtctcatggccgtagaagcagccaaattcctctgcctttgccttcccttcaggagtcacatgctaaggcatccttggggcatttgggaaaagngccgcttgggggtgagagtgctctagggccactctgcaatgtccctggggnccgatgaggtaacaaatgcaccccggggacccagaggagtggggaaagacatgaaggggatttgggaacagatccgtaaaaaataacctgttntggaaattcaccacaggcca

SEQ ID NO: 69 - DNA, 323 bp, Homo sapiens
  5' terminal sequence. spleen tyrosine kinase (SYK) gene.
  modified_base (137): a, t, c or g
  modified_base (232): a, t, c or g
  modified_base (262): a, t, c or g
  modified_base (284): a, t, c or g
  modified_base (300): a, t, c or g
ttaattttggaggccgtccacaacttccaggttcccatcctgcgacttggtcagcgggtggaataatctcaagaatcaaatcatactccttcccaaagcctggccacagaaagtcctcccctgcccaagggaaccgncaagagagtactgtgtcattcaatccgtatgaggccaggaacttgcacccggggcttgcaggacaaagggcccccagaggaggaagccctacccntgggacacagaggtgttacggaggagcccntacggcgggaccccgagggagnttcagggcccaagggngtttttacttgggggaccgaaag

SEQ ID NO: 70 - DNA, 2541 bp, Homo sapiens
  spleen tyrosine kinase (SYK) gene.
gaggaagagccgcgggcccggcggctgaggccaccccggcggcggctggagagcgaggaggagcgggtggccccgcgctgcgcccgccctcgcctcacctggcgcaggtggacacctgcgcaggtgtgtgccctccggcccctgaagcatggccagcagcggcatggctgacagcgccaaccacctgcccttctttttcggcaacatcacccgggaggaggcagaagattacctggtccaggggggcatgagtgatgggctttatttgctgcgccagagccgcaactacctgggtggcttcgccctgtccgtggcccacgggaggaaggcacaccactacaccatcgagcgggagctgaatggcacctacgccatcgccggtggcaggacccatgccagccccgccgacctctgccactaccactcccaggagtctgatggcctggtctgcctcctcaagaagcccttcaaccggccccaaggggtgcagcccaagactgggccctttgaggatttgaaggaaaacctcatcagggaatatgtgaagcagacatggaacctgcagggtcaggctctggagcaggccatcatcagtcagaagcctcagctggagaagctgatcgctaccacagcccatgaaaaaatgccttggttccatggaaaaatctctcgggaagaatctgagcaaattgtcctgataggatcaaagacaaatggaaagttcctgatccgagccagagacaacaacggctcctacgccctgtgcctgctgcacgaagggaaggtgctgcactatcgcatcgacaaagacaagacagggaagctctccatccccgagggaaagaagttcgacacgctctggcagctagtcgagcattattcttataaagcagatggtttgttaagagttcttactgtcccatgtcaaaaaatcggcacacagggaaatgttaattttggaggccgtccacaacttccaggttcccatcctgcgtcctcccctgcccaagggaaccggcaagagagtactgtgtcattcaatccgtatgagccagaacttgcaccctgggctgcagacaaaggcccccagagagaagccctacccatggacacagaggtgtacgagagcccctacgcggaccccgaggagatcaggcccaaggaggtttacctggaccgaaagctgctgacgctggaagacaaagaactgggctctggtaattttggaactgtgaaaaagggctactaccaaatgaaaaaagttgtgaaaaccgtggctgtgaaaatactgaaaaacgaggccaatgaccccgctcttaaagatgagttattagcagaagcaaatgtcatgcagcagctggacaacccgtacatcgtgcggatgatcgggatatgcgaggccgagtcctggatgctggttatggagatggcagaacttggtcccctcaataagtatttgcagcagaacagacatgtcaaggataagaacatcatagaactggttcatcaggtttccatgggcatgaagtacttggaggagagcaattttgtgcacagagatctggctgcaagaaatgtgttgctagttacccaacattacgccaagatcagtgatttcggactttccaaagcactgcgtgctgatgaaaactactacaaggcccagacccatggaaagtggcctgtcaagtggtacgctccggaatgcatcaactactacaagttctccagcaaaagcgatgtctggagctttggagtgttgatgtgggaagcattctcctatgggcagaagccatatcgagggatgaaaggaagtgaagtcaccgctatgttagagaaaggagagcggatggggtgccctgcagggtgtccaagagagatgtacgatctcatgaatctgtgctggacatacgatgtggaaaacaggcccggattcgcagcagtggaactgcggctgcgcaattactactatgacgtggtgaactaaccgctcccgcacctgtcggtggctgcctttgatcacaggagcaatcacaggaaaatgtatccagaggaattgattgtcagccacctccctctgccagtcgggagagccaggcttggatggaacatgcccacaacttgtcacccaaagcctgtcccaggactcaccctccacaaagcaaaggcagtcccgggagaaaagacggatggcaggatccaaggggctagctggatttgtttgttttcttgtctgtgtgattttcatacaggttatttttacgatctgtttccaaatccctttcatgtctttccacttctctgggtcccggggtgcatttgttactcatcgggcccagggacattgcagagtggcctagagcactctcaccccaagcggccttttccaaatgcccaaggatgccttagcatgtgactcctgaagggaaggcaaaggcagaggaatttggctgcttctacggccatgagactgatccctggccactgaaaagctttcctgacaataaaaatgttttgaggctttaaaaagaaaaaaaaaaa

SEQ ID NO: 71 - DNA, 311 bp, Homo sapiens
  5' terminal sequence. interleukin 7 receptor (IL7R) gene.
  modified_base (172): a, t, c or g
  modified_base (269): a, t, c or g
taacatctttgtaagaaaccaagaaaaaatttaaatgtgagtttcaatcctgaaagtttcctggactgccagattcatagggtggatgacattcaagctagagatgaagtggaaggttttctgcaagatacgtttcctcagcaactagaagaatctgagaagcagaggcttngaggggatgtgcagagccccaactgcccatctgaggatgtagtcatcactccaggaaagctttgggaaggagattcatccctcacatgcctgggctngggaatgttcagtgcatgtgacgcccctatttttctcctttt

SEQ ID NO: 72 - DNA, 1658 bp, Homo sapiens
  interleukin 7 receptor (IL7R) gene.
ctctctctctatctctctcagaatgacaattctaggtacaacttttggcatggttttttctttacttcaagtcgtttctggagaaagtggctatgctcaaaatggagacttggaagatgcagaactggatgactactcattctcatgctatagccagttggaagtgaatggatcgcagcattcactgacctgtgcttttgaggacccagatgtcaacaccaccaatctggaatttgaaatatgtggggccctcgtggaggtaaagtgcctgaatttcaggaaactacaagagatatatttcatcgagacaaagaaattcttactgattggaaagagcaatatatgtgtgaaggttggagaaaagagtctaacctgcaaaaaaatagacctaaccactatagttaaacctgaggctccttttgacctgagtgtcatctatcgggaaggagccaatgactttgtggtgacatttaatacatcacacttgcaaaagaagtatgtaaaagttttaatgcatgatgtagcttaccgccaggaaaaggatgaaaacaaatggacgcatgtgaatttatccagcacaaagctgacactcctgcagagaaagctccaaccggcagcaatgtatgagattaaagttcgatccatccctgatcactattttaaaggcttctggagtgaatggagtccaagttattacttcagaactccagagatcaataatagctcaggggagatggatcctatcttactaaccatcagcattttgagttttttctctgtcgctctgttggtcatcttggcctgtgtgttatggaaaaaaaggattaagcctatcgtatggcccagtctccccgatcataagaagactctggaacatctttgtaagaaaccaagaaaaaatttaaatgtgagtttcaatcctgaaagtttcctggactgccagattcatagggtggatgacattcaagctagagatgaagtggaaggttttctgcaagatacgtttcctcagcaactagaagaatctgagaagcagaggcttggaggggatgtgcagagccccaactgcccatctgaggatgtagtcgtcactccagaaagctttggaagagattcatccctcacatgcctggctgggaatgtcagtgcatgtgacgcccctattctctcctcttccaggtccctagactgcagggagagtggcaagaatgggcctcatgtgtaccaggacctcctgcttagccttgggactacaaacagcacgctgccccctccattttctctccaatctggaatcctgacattgaacccagttgctcagggtcagcccattcttacttccctgggatcaaatcaagaagaagcatatgtcaccatgtccagcttctaccaaaaccagtgaagtgtaagaaacccagactgaacttaccgtgagcgacaaagatgatttaaaagggaagtctagagttcctagtctccctcacagcacagagaagacaaaattagcaaaaccccactacacagtctgcaagattctgaaacattgctttgaccactcttcctgagttcagtggcactcaacatgagtcaagagcatcctgcttctaccatgtggatttggtcacaaggtttaaggtgacccaatgattcagctattt

SEQ ID NO: 73 - DNA, 236 bp, Homo sapiens
  3' terminal sequence. v-myc avian myelocytomatosis viral oncogene homolog (MYC) gene.
  modified_base (87): a, t, c or g
  modified_base (206): a, t, c or g
taaaaacaatagaaaaaaatcaactttaaaaagcaaaatgtacttaaataaaaaaaattagggtttatagtacctataatactaggnactatatactaggattgaaattctgtgtaactgctataaacgttttattaaagttatttacatttaatgggcaatatttacagaggaaacattgtgtaaatcttaaaattttttaaaanccaattcttaaataccaaatctgttaaggg

SEQ ID NO: 74 - DNA, 413 bp, Homo sapiens
  5' terminal sequence. v-myc avian myelocytomatosis viral oncogene homolog (MYC) gene.
  modified_base (306): a, t, c or g
  modified_base (354): a, t, c or g
  modified_base (366): a, t, c or g
  modified_base (380): a, t, c or g
  modified_base (400): a, t, c or g
  modified_base (409): a, t, c or g
acgtctccacacatcagcacaactacgcagcgcctccctccactcggaaggactatcctgctgccaagagggtcaagttggacagtgtcagagtcctgagacagatcagcaacaaccgaaaatgcaccagccccaggtcctcggacaccgaggagaatgtcaagaggcgaacacacaacgtcttgggagcgccagaggaggaacgagctaaaacggagcttttttgccctgcgtgaccagatcccggagttgggaaaacaatgaaaaggcccccaaggtagttattcctttaaaaaagccacagcntacatcctgttccgttccaaggcaggagggagccaaaagttcattttnttgaaggagggnttttttttccgggnaacgacgaggaaccattttnaaacacaantttt

SEQ ID NO: 75 - DNA, 2121 bp, Homo sapiens
  v-myc avian myelocytomatosis viral oncogene homolog (MYC) gene.
ctgctcgcggccgccaccgccgggccccggccgtccctggctcccctcctgcctcgagaagggcagggcttctcagaggcttggcgggaaaaaagaacggagggagggatcgcgctgagtataaaagccggttttcggggctttatctaactcgctgtagtaattccagcgagaggcagagggagcgagcgggcggccggctagggtggaagagccgggcgagcagagctgcgctgcgggcgtcctgggaagggagatccggagcgaatagggggcttcgcctctggcccagccctcccgcttgatcccccaggccagcggtccgcaacccttgccgcatccacgaaactttgcccatagcagcgggcgggcactttgcactggaacttacaacacccgagcaaggacgcgactctcccgacgcggggaggctattctgcccatttggggacacttccccgccgctgccaggacccgcttctctgaaaggctctccttgcagctgcttagacgctggatttttttcgggtagtggaaaaccagcagcctcccgcgacgatgcccctcaacgttagcttcaccaacaggaactatgacctcgactacgactcggtgcagccgtatttctactgcgacgaggaggagaacttctaccagcagcagcagcagagcgagctgcagcccccggcgcccagcgaggatatctggaagaaattcgagctgctgcccaccccgcccctgtcccctagccgccgctccgggctctgctcgccctcctacgttgcggtcacacccttctcccttcggggagacaacgacggcggtggcgggagcttctccacggccgaccagctggagatggtgaccgagctgctgggaggagacatggtgaaccagagtttcatctgcgacccggacgacgagaccttcatcaaaaacatcatcatccaggactgtatgtggagcggcttctcggccgccgccaagctcgtctcagagaagctggcctcctaccaggctgcgcgcaaagacagcggcagcccgaaccccgcccgcggccacagcgtctgctccacctccagcttgtacctgcaggatctgagcgccgccgcctcagagtgcatcgacccctcggtggtcttcccctaccctctcaacgacagcagctcgcccaagtcctgcgcctcgcaagactccagcgccttctctccgtcctcggattctctgctctcctcgacggagtcctccccgcagggcagccccgagcccctggtgctccatgaggagacaccgcccaccaccagcagcgactctgaggaggaacaagaagatgaggaagaaatcgatgttgtttctgtggaaaagaggcaggctcctggcaaaaggtcagagtctggatcaccttctgctggaggccacagcaaacctcctcacagcccactggtcctcaagaggtgccacgtctccacacatcagcacaactacgcagcgcctccctccactcggaaggactatcctgctgccaagagggtcaagttggacagtgtcagagtcctgagacagatcagcaacaaccgaaaatgcaccagccccaggtcctcggacaccgaggagaatgtcaagaggcgaacacacaacgtcttggagcgccagaggaggaacgagctaaaacggagcttttttgccctgcgtgaccagatcccggagttggaaaacaatgaaaaggcccccaaggtagttatccttaaaaaagccacagcatacatcctgtccgtccaagcagaggagcaaaagctcatttctgaagaggacttgttgcggaaacgacgagaacagttgaaacacaaacttgaacagctacggaactcttgtgcgtaaggaaaagtaaggaaaacgattccttctaacagaaatgtcctgagcaatcacctatgaacttgtttcaaatgcatgatcaaatgcaacctcacaaccttggctgagtcttgagactgaaagatttagccataatgtaaactgcctcaaattggactttgggcataaaagaacttttttatgcttaccatcttttttttttctttaacagatttgtatttaagaattgtttttaaaaaattttaa

SEQ ID NO: 76 - DNA, 260 bp, Homo sapiens
  3' terminal sequence. gata-binding protein 3 (GATA3) gene.
tcacagcactagagaccctgttaaataggggatatgagtcagaatggcttattcacagatggggtccagattcagtggttggaacacagacaccacagtgagctcctttgcaaagtggcaaacataattttgctttctgccttcaaaaacatatatccatcgcgtttaggcttcatgatactgctcctgcaaaaatgcaagtcgaaagggactgcagggactctcgctggggggccctgtgagcatcgagcagggctctt

SEQ ID NO: 77 - DNA, 409 bp, Homo sapiens
  5' terminal sequence. gata-binding protein 3 (GATA3) gene.
  modified_base (210): a, t, c or g
  modified_base (216): a, t, c or g
  modified_base (319): a, t, c or g
  modified_base (325): a, t, c or g
  modified_base (374): a, t, c or g
  modified_base (383): a, t, c or g
  modified_base (388): a, t, c or g
  modified_base (393): a, t, c or g
  modified_base (400): a, t, c or g
cattctggttcatagatggcatcttttcactgtgttctcacattggtggaaaggaagaactctggtttcttcacttccttataagggcaccaatcttattcacgagggcttcaccctcgaaataatcacgtcctcaaaacccccaccttctaatattctaataccatcacgtgagggcttaggtttcaacataagaattcggtggtggtngggttngggggagagggaaacaaacatccagaccagaaaccgaaaaatgtctagcaaatccaaaaagtgcaaaaaagtgcatgactcactggaggacttccccaaggancagctncgttttaacccgggccgcccttttccaggacacatgttccttccctggnggccacatnttggnccttnaggccantccagggca

SEQ ID NO: 78 - DNA, 2365 bp, Homo sapiens
  gata-binding protein 3 (GATA3) gene.
tcccagccttcccatccccccaccgaaagcaaatcattcaacgacccccgaccctccgacggcaggagccccccgacctcccaggcggaccgcccttccctccccgcgcgggttccgggcccggcgagagggcgcgacgacagccgaggccatggaggtgacggcggaccagccgcgctgggtgagccaccaccaccccgccgtgctcaacgggcagcacccggacacgcaccacccgggcctcagccactcctacatggacgcggcgcagtacccgctgccggaggaggtggatgtgctttttaacatcgacggtcaaggcaaccacgtcccgccctactacggaaactcggtcagggccacggtgcagaggtaccctccgacccaccacgggagccaggtgtgccgcccgcctctgcttcatggatccctaccctggctggacggcggcaaagccctgggcagccaccacaccgcctccccctggaatctcagccccttctccaagacgtccatccaccacggctccccggggcccctctccgtctaccccccggcctcgtcctcctccttgtcggggggccacgccagcccgcacctcttcaccttcccgcccaccccgccgaaggacgtctccccggacccatcgctgtccaccccaggctcggccggctcggcccggcaggacgagaaagagtgcctcaagtaccaggtgcccctgcccgacagcatgaagctggagtcgtcccactcccgtggcagcatgaccgccctgggtggagcctcctcgtcgacccaccaccccatcaccacctacccgccctacgtgcccgagtacagctccggactcttcccccccagcagcctgctgggcggctcccccaccggcttcggatgcaagtccaggcccaaggcccggtccagcacaggcagggagtgtgtgaactgtggggcaacctcgaccccactgtggcggcgagatggcacgggacactacctgtgcaacgcctgcgggctctatcacaaaatgaacggacagaaccggcccctcattaagcccaagcgaaggctgtctgcagccaggagagcagggacgtcctgtgcgaactgtcagaccaccacaaccacactctggaggaggaatgccaatggggaccctgtctgcaatgcctgtgggctctactacaagcttcacaatattaacagacccctgactatgaagaaggaaggcatccagaccagaaaccgaaaaatgtctagcaaatccaaaaagtgcaaaaaagtgcatgactcactggaggacttccccaagaacagctcgtttaacccggccgccctctccagacacatgtcctccctgagccacatctcgcccttcagccactccagccacatgctgaccacgcccacgccgatgcacccgccatccagcctgtcctttggaccacaccacccctccagcatggtcaccgccatgggttagagccctgctcgatgctcacagggcccccagcgagagtccctgcagtccctttcgacttgcatttttgcaggagcagtatcatgaagcctaaacgcgatggatatatgtttttgaaggcagaaagcaaaattatgtttgccactttgcaaaggagctcactgtggtgtctgtgttccaaccactgaatctggaccccatctgtgaataagccattctgactcatatcccctatttaacagggtctctagtgctgtgaaaaaaaaaaatcctgaacattgcatataacttatattgtaagaaatactgtacaatgactttattgcatctgggtagctgtaaggcatgaaggatgccaagaagtttaaggaatatgggagaaatagtgtggaaattaagaagaaactaggtctgatattcaaatggacaaactgccagttttgtttcctttcactggccacagttgtttgatgcattaaaagaaaataaaaaaaagaaaaaagagaaaagaaaaaaaaagaaaaaagttgtaggcgaatcatttgttcaaagctgttggccctctgcaaaggaaataccagttctgggcaatcagtgttaccgttcaccagttgccattgagggtttcagagagcctttttctaggcctacatgctttgtgaacaagtccctgtaattgttgtttgtatgtataattcaaagcaccaaaataagaaaagatgtagatttatttcatcatattatacagaccgaactgttgtataaatttatttactgctagtcttaagaactgctttctttcgtttgtttgtttcaatattttccttctctctcaattttcggttgaataaactagattacattcagttggcaaaaaaaaaaaaa

SEQ ID NO: 79 - DNA, 328 bp, Homo sapiens
  3' terminal sequence. growth factor receptor-bound protein 7 (GRB7) gene.
  modified_base (7): a, t, c or g
  modified_base (11): a, t, c or g
  modified_base (284): a, t, c or g
  modified_base (315): a, t, c or g
  modified_base (324): a, t, c or g
ttgtatntttnaaataatctttattgtcactagtataaaacagagcagatcaactggcctctcggtctgtacaaagtgtggggcgtgaaaccgctgggctgcccccacttctcccataattccctgccctagagcagcagctccagagctaggagaaggagagggggccacccaaggccttcccttgaggagaggggtcaggagtggactggagtgggggctgttttctatctgagggaggcaaagaagcagaggagaaaactggagtggcggaaccctcccgntcctcatcccgtcccctgtggccgatcccanagtccactnggat

SEQ ID NO: 80 - DNA, 428 bp, Homo sapiens
  5' terminal sequence. growth factor receptor-bound protein 7 (GRB7) gene.
  modified_base (272): a, t, c or g
  modified_base (337): a, t, c or g
  modified_base (362): a, t, c or g
ggctccccacccttgagaagtgcctcagataataccctggtggccatggacttctctggccatgctgggcgtgtcattgagaacccccgggaggctctgagtgtggccctggaggaggcccaggcctggaggaagaagacaaaccaccgcctcagcctgcccatgccagcctccggacgagcctcagtgcagccatccaccgcacccaactctggttccacgggcgcatttcccgtgaggagagccagcgtttattgggacagcagggcttngtagacggcctgttcctgggtccgggagagtcagcgggaacccccaggggtttttcctctttttnttgccaccttgcagaaagtgaagcnttattttcattccttgccgagcgaaggaggaagggccgcttttattttaagcattggttgattggc

SEQ ID NO: 81 - DNA, 2205 bp, Homo sapiens
  growth factor receptor-bound protein 7 (GRB7) gene.
cacagggctcccccccgcctctgacttctctgtccgaagtcgggacaccctcctaccacctgtagagaagcgggagtggatctgaaataaaatccaggaatctgggggttcctagacggagccagacttcggaacgggtgtcctgctactcctgctggggctcctccaggacaagggcacacaactggttccgttaagcccctctctcgctcagacgccatggagctggatctgtctccacctcatcttagcagctctccggaagacctttggccagcccctgggacccctcctgggactccccggccccctgatacccctctgcctgaggaggtaaagaggtcccagcctctcctcatcccaaccaccggcaggaaacttcgagaggaggagaggcgtgccacctccctcccctctatccccaaccccttccctgagctctgcagtcctccctcacagagcccaattctcgggggcccctccagtgcaagggggctgctcccccgcgatgccagccgcccccatgtagtaaaggtgtacagtgaggatggggcctgcaggtctgtggaggtggcagcaggtgccacagctcgccacgtgtgtgaaatgctggtgcagcgagctcacgccttgagcgacgagacctgggggctggtggagtgccacccccacctagcactggagcggggtttggaggaccacgagtccgtggtggaagtgcaggctgcctggcccgtgggcggagatagccgcttcgtcttccggaaaaacttcgccaagtacgaactgttcaagagctccccacactccctgttcccagaaaaaatggtctccagctgtctcgatgcacacactggtatatcccatgaagacctcatccagaacttcctgaatgctggcagctttcctgagatccagggctttctgcagctgcggggttcaggacggaagctttggaaacgctttttctgtttcttgcgccgatctggcctctattactccaccaagggcacctctaaggatccgaggcacctgcagtacgtggcagatgtgaacgagtccaacgtgtacgtggtgacgcagggccgcaagctctacgggatgcccactgacttcggtttctgtgtcaagcccaacaagcttcgaaatggacacaaggggcttcggatcttctgcagtgaagatgagcagagccgcacctgctggctggctgccttccgcctcttcaagtacggggtgcagctgtacaagaattaccagcaggcacagtctcgccatctgcatccatcttgtttgggctccccacccttgagaagtgcctcagataataccctggtggccatggacttctctggccatgctgggcgtgtcattgagaacccccgggaggctctgagtgtggccctggaggaggcccaggcctggaggaagaagacaaaccaccgcctcagcctgcccatgccagcctccggcacgagcctcagtgcagccatccaccgcacccaactctggttccacgggcgcatttcccgtgaggagagccagcggcttattggacagcagggcttggtagacggcctgttcctggtccgggagagtcagcggaacccccagggctttgtcctctctttgtgccacctgcagaaagtgaagcattatctcatcctgccgagcgaggaggagggtcgcctgtacttcagcatggatgatggccagacccgcttcactgacctgctgcagctcgtggagttccaccagctgaaccgcggcatcctgccgtgcttgctgcgccattgctgcacgcgggtggccctctgaccaggccgtggactggctcatgcctcagcccgccttcaggctgcccgccgcccctccacccatccagtggactctggggcgcggccacaggggacgggatgaggagcgggagggttccgccactccagttttctcctctgcttctttgcctccctcagatagaaaacagcccccactccagtccactcctgacccctctcctcaagggaaggccttgggtggccccctctccttctcctagctctggaggtgctgctctagggcagggaattatgggagaagtgggggcagcccaggcggtttcacgccccacactttgtacagaccgagaggccagttgatctgctctgttttatactagtgacaataaagattattttttgatac

SEQ ID NO: 82 - DNA, 313 bp, Homo sapiens
  5' terminal sequence. topoisomerase (dna) ii beta (180kd) (TOP2B) gene.
  modified_base (291): a, t, c or g
  modified_base (307): a, t, c or g
gaaatttgacagtaatgaagaagattctgcttctgttttttcaccatcatttggtctgaaacagacagataaagttccaagtaaaacggtagctgctaaaaagggtatgtacttatatttgattgagttaagcattggatagagatagttaatgtaaaaggaaatgtaatttaatttgaaactatttgcatttttttatcataaaacaattaaggaagtataagtgcttataaggaggacctctcgttttctagccatctgagggcgttaataaatttctgtaggacttantttaaagctgttgtanttttaa

SEQ ID NO: 83 - DNA, 4866 bp, Homo sapiens
  topoisomerase (dna) ii beta (180kd) (TOP2B) gene.
atggccaagtcgggtggctgcggcgcgggagccggcgtgggcggcggcaacggggcactgacctgggtgaacaatgctgcaaaaaaagaagagtcagaaactgccaacaaaaatgattcttcaaagaagttgtctgttgagagagtgtatcagaagaagacacaacttgaacacattcttcttcgtcctgatacatatattgggtcagtggagccattgacgcagttcatgtgggtgtatgatgaagatgtaggaatgaattgcagggaggttacctttgtgccaggtttatacaagatctttgatgaaattttggttaatgctgctgacaataaacagagggataagaacatgacttgtattaaagtttctattgatcctgaatctaacattataagcatttggaataatgggaaaggcattccagtagtagaacacaaggtagagaaagtttatgttcctgctttaatttttggacagcttttaacatccagtaactatgatgatgatgagaaaaaagttacaggtggtcgtaatggttatggtgcaaaactttgtaatattttcagtacaaagtttacagtagaaacagcttgcaaagaatacaaacacagttttaagcagacatggatgaataatatgatgaagacttctgaagccaaaattaaacattttgatggtgaagattacacatgcataacattccaaccagatctgtccaaatttaagatggaaaaacttgacaaggatattgtggccctcatgactagaagggcatatgatttggctggttcgtgtagaggggtcaaggtcatgtttaatggaaagaaattgcctgtaaatggatttcgcagttatgtagatctttatgtgaaagacaaattggatgaaactggggtggccctgaaagttattcatgagcttgcaaatgaaagatgggatgtttgtctcacattgagtgaaaaaggattccagcaaatcagctttgtaaatagtattgcaactacaaaaggtggacggcacgtggattatgtggtagatcaagttgttggtaaactgattgaagtagttaagaaaaagaacaaagctggtgtatcagtgaaaccatttcaagtaaaaaaccatatatgggtttttattaattgccttattgaaaatccaacttttgattctcagactaaggaaaacatgactctgcagcccaaaagttttgggtctaaatgccagctgtcagaaaaattttttaaagcagcctctaattgtggcattgtagaaagtatcctgaactgggtgaaatttaaggctcagactcagctgaataagaagtgttcatcagtaaaatacagtaaaatcaaaggtattcccaaactggatgatgctaatgatgctggtggtaaacattccctggagtgtacactgatattaacagagggagactctgccaaatcactggctgtgtctggattaggtgtgattggacgagacagatacggagtttttccactcaggggcaaaattcttaatgtacgggaagcttctcataaacagatcatggaaaatgctgaaataaataatattattaaaatagttggtctacaatataagaaaagttacgatgatgcagaatctctgaaaaccttacgctatggaaagattatgattatgaccgatcaggatcaagatggttctcacataaaaggcctgcttattaatttcatccatcacaattggccatcacttttgaagcatggttttcttgaagagttcattactcctattgtaaaggcaagcaaaaataagcaggaactttccttctacagtattcctgaatttgacgaatggaaaaaacatatagaaaaccagaaagcctggaaaataaagtactataaaggattgggtactagtacagctaaagaagcaaaggaatattttgctgatatggaaaggcatcgcatcttgtttagatatgctggtcctgaagatgatgctgccattaccttggcatttagtaagaagaagattgatgacagaaaagaatggttaacaaattttatggaagaccggagacagcgtaggctacatggcttaccagagcaatttttatatggtactgcaacaaagcatttgacttataatgatttcatcaacaaggaattgattctcttctcaaactcagacaatgaaagatctataccatctcttgttgatggctttaaacctggccagcggaaagttttatttacctgtttcaagaggaatgataaacgtgaagtaaaagttgcccagttggctggctctgttgctgagatgtcggcttatcatcatggagaacaagcattgatgatgactattgtgaatttggctcagaactttgtgggaagtaacaacattaacttgcttcagcctattggtcagtttggaactcggcttcatggtggcaaagatgctgcaagccctcgttatattttcacaatgttaagcactttagcaaggctactttttcctgctgtggatgacaacctccttaagttcctttatgatgataatcaacgtgtagagcctgagtggtatattcctataattcccatggttttaataaatggtgctgagggcattggtactggatgggcttgtaaactacccaactatgatgctagggaaattgtgaacaatgtcagacgaatgctagatggcctggatcctcatcccatgcttccaaactacaaaaactttaaaggcacgattcaagaacttggtcaaaaccagtatgcagtcagtggtgaaatatttgtagtggacagaaacacagtagaaattacagagcttccagttagaacttggacacaggtatataaagaacaggttttagaacctatgctaaatggaacagataaaacaccagcattaatttctgattataaagaatatcatactgacacaactgtgaaatttgtggtgaaaatgactgaagagaaactagcacaagcagaagctgctggactgcataaagtttttaaacttcaaactactcttacttgtaattccatggtactttttgatcatatgggatgtctgaagaaatatgaaactgtgcaagacattctgaaagaattctttgatttacgattaagttattacggtttacgtaaggagtggcttgtgggaatgttgggagcagaatctacaaagcttaacaatcaagcccgtttcattttagagaagatacaagggaaaattactatagagaataggtcaaagaaagatttgattcaaatgttagtccagagaggttatgaatctgacccagtgaaagcctggaaagaagcacaagaaaaggcagcagaagaggatgaaacacaaaaccagcatgatgatagttcctccgattcaggaactccttcaggcccagattttaattatattttaaatatgtctctgtggtctcttactaaagaaaaagttgaagaactgattaaacagagagatgcaaaagggcgagaggtcaatgatcttaaaagaaaatctccttcagatctttggaaagaggatttagcggcatttgttgaagaactggataaagtggaatctcaagaacgagaagatgttctggctggaatgtctggaaaagcaattaaaggtaaagttggcaaacctaaggtgaagaaactccagttggaagagacaatgccctcaccttatggcagaagaataattcctgaaattacagctatgaaggcagatgccagcaaaaagttgctgaagaagaagaagggtgatcttgatactgcagcagtaaaagtggaatttgatgaagaattcagtggagcaccagtagaaggtgcaggagaagaggcattgactccatcagttcctataaataaaggtcccaaacctaagagggagaagaaggagcctggtaccagagtgagaaaaacacctacatcatctggtaaacctagtgcaaagaaagtgaagaaacggaatccttggtcagatgatgaatccaagtcagaaagtgatttggaagaaacagaacctgtggttattccaagagattctttgcttaggagagcagcagccgaaagacctaaatacacatttgatttctcagaagaagaggatgatgatgctgatgatgatgatgatgacaataatgatttagaggaattgaaagttaaagcatctcccataacaaatgatggggaagatgaatttgttccttcagatgggttagataaagatgaatatacattttcaccaggcaaatcaaaagccactccagaaaaatctttgcatgacaaaaaaagtcaggattttggaaatctcttctcatttccttcatattctcagaagtcagaagatgattcagctaaatttgacagtaatgaagaagattctgcttctgttttttcaccatcatttggtctgaaacagacagataaagttccaagtaaaacggtagctgctaaaaagggaaaaccgtcttcagatacagtccctaagcccaagagagccccaaaacagaagaaagtagtagaggctgtaaactctgactcggattcagaatttggcattccaaagaagactacaacaccaaaaggtaaaggccgaggggcaaagaaaaggaaagcatctggctctgaaaatgaaggcgattataaccctggcaggaaaacatccaaaacaacaagcaagaaaccgaagaagacatcttttgatcaggattcagatgtggacatcttcccctcagacttccctactgagccaccttctctgccacgaaccggtcgggctaggaaagaagtaaaatattttacagagtctgatgaagaagaagatgatgttgattttgcaatgtttaattaa

SEQ ID NO: 84 - DNA, 311 bp, Homo sapiens
  3' terminal sequence. caspase 4, apoptosis-related cysteine protease (CASP4) gene.
cacttttattgaaatacaaaatgttaaatatgcaagctgtactaatgaaggtgctccttgaagttgattaaggagggctgggctgcttgtggcttccattttcaattgccaggaaagaggtagaaatatcttgtcatggacagtcgttctatggtgggcatttgagctttggcccttggagtttcaaatgattgctgtaccttccgaaatacttcctctaggtggcagcaccaagaatatttctgggaagcatgtgatgagttgtgtgatgaagatagagccccattgtgctgtctctcccagggcacgtt

SEQ ID NO: 85 - DNA, 1291 bp, Homo sapiens
  caspase 4, apoptosis-related cysteine protease (CASP4) gene.
gctctttccaacgctgtaaaaaaggacagaggctgttccctatggcagaaggcaaccacagaaaaaagccacttaaggtgttggaatccctgggcaaagatttcctcactggtgttttggataacttggtggaacaaaatgtactgaactggaaggaagaggaaaaaaagaaatattacgatgctaaaactgaagacaaagttcgggtcatggcagactctatgcaagagaagcaacgtatggcaggacaaatgcttcttcaaaccttttttaacatagaccaaatatcccccaataaaaaagctcatccgaatatggaggctggaccacctgagtcaggagaatctacagatgccctcaagctttgtcctcatgaagaattcctgagactatgtaaagaaagagctgaagagatctatccaataaaggagagaaacaaccgcacacgcctggctctcatcatatgcaatacagagtttgaccatctgcctccgaggaatggagctgactttgacatcacagggatgaaggagctacttgagggtctggactatagtgtagatgtagaagagaatctgacagccagggatatggagtcagcgctgagggcatttgctaccagaccagagcacaagtcctctgacagcacattcttggtactcatgtctcatggcatcctggagggaatctgcggaactgtgcatgatgagaaaaaaccagatgtgctgctttatgacaccatcttccagatattcaacaaccgcaactgcctcagtctgaaggacaaacccaaggtcatcattgtccaggcctgcagaggtgcaaaccgtggggaactgtgggtcagagactctccagcatccttggaagtggcctcttcacagtcatctgagaacctggaggaagatgctgtttacaagacccacgtggagaaggacttcattgctttctgctcttcaacgccacacaacgtgtcctggagagacagcacaatgggctctatcttcatcacacaactcatcacatgcttccagaaatattcttggtgctgccacctagaggaagtatttcggaaggtacagcaatcatttgaaactccaagggccaaagctcaaatgcccaccatagaacgactgtccatgacaagatatttctacctctttcctggcaattgaaaatggaagccacaagcagcccagccctccttaatcaacttcaaggagcaccttcattagtacagcttgcatatttaacattttgtatttcaataaaagtgaagacaaaaaaaaaa

SEQ ID NO: 86 - DNA, 319 bp, Homo sapiens
  5' terminal sequence. tissue inhibitor of metalloproteinase 2 (TIMP2) gene.
  modified_base (155): a, t, c or g
  modified_base (160): a, t, c or g
  modified_base (172): a, t, c or g
  modified_base (173): a, t, c or g
  modified_base (189): a, t, c or g
  modified_base (226): a, t, c or g
  modified_base (227): a, t, c or g
  modified_base (234): a, t, c or g
  modified_base (285): a, t, c or g
  modified_base (303): a, t, c or g
  modified_base (309): a, t, c or g
tggacccatgggatgagtgttttattcatgctgtttccaggaagggatgtcagagctggaccagtcgaaacccttggaggctttttttgcagttggccacaggggcgttggaggcctgcttatgggtcctcgatgtcgagaaactcctgcttggnggacnccgcgccgcgtnnccacgcacaggagccntcacttctcttgatgcaggcgaagaacttggcctggnncccgttnatgttcttctctgtgacccagtccatccagaggcactcgtccggggagganatgtagcacgggatcatngggcancgcgtgatct

SEQ ID NO: 87 - DNA, 1075 bp, Homo sapiens
  tissue inhibitor of metalloproteinase 2 (TIMP2) gene.
cgcagcaaacacatccgtagaaggcagcgcggccgccgagagccgcagcgccgctcgcccgccgccccccaccccgccgccccgcccggcgaattgcgccccgcgcccctcccctcgcgcccccgagacaaagaggagagaaagtttgcgcggccgagcggggcaggtgaggagggtgagccgcgcgggaggggcccgcctcggccccggctcagcccccgcccgcgcccccagcccgccgccgcgagcagcgcccggaccccccagcggcggcccccgcccgcccagccccccggcccgccatgggcgccgcggcccgcaccctgcggctggcgctcggcctcctgctgctggcgacgctgcttcgcccggccgacgcctgcagctgctccccggtgcacccgcaacaggcgttttgcaatgcagatgtagtgatcagggccaaagcggtcagtgagaaggaagtggactctggaaacgacatttatggcaaccctatcaagaggatccagtatgagatcaagcagataaagatgttcaaagggcctgagaaggatatagagtttatctacacggccccctcctcggcagtgtgtggggtctcgctggacgttggaggaaagaaggaatatctcattgcaggaaaggccgagggggacggcaagatgcacatcaccctctgtgacttcatcgtgccctgggacaccctgagcaccacccagaagaagagcctgaaccacaggtaccagatgggctgcgagtgcaagatcacgcgctgccccatgatcccgtgctacatctcctccccggacgagtgcctctggatggactgggtcacagagaagaacatcaacgggcaccaggccaagttcttcgcctgcatcaagagaagtgacggctcctgtgcgtggtaccgcggcgcggcgccccccaagcaggagtttctcgacatcgaggacccataagcaggcctccaacgcccctgtggccaactgcaaaaaaagcctccaagggtttcgactggtccagctctgacatcccttcctggaaacagcatgaataaaacactcatccc

SEQ ID NO: 88 - DNA, 225 bp, Homo sapiens
  3' terminal sequence. d-dopachrome tautomerase (DDT) gene.
  modified_base (36): a, t, c or g
  modified_base (64): a, t, c or g
  modified_base (74): a, t, c or g
  modified_base (112): a, t, c or g
  modified_base (118): a, t, c or g
  modified_base (120): a, t, c or g
  modified_base (212): a, t, c or g
  modified_base (221): a, t, c or g
ttttttgaatgaggaagctctcttcatttatttcanatgaggatgaagaagaggattatgtgancacaggaatnttgcatgcgggataatccaaagctggttatctccaggncctcantntgccaagagatctctctggaagaagcagccagttcacagatgccctggatccctccgtgcccaatcataaaaaagtcatgaccgtccctatnttgccaatntgcc

SEQ ID NO: 89 - DNA, 312 bp, Homo sapiens
  5' terminal sequence. d-dopachrome tautomerase (DDT) gene.
  modified_base (50): a, t, c or g
  modified_base (53): a, t, c or g
  modified_base (289): a, t, c or g
  modified_base (297): a, t, c or g
cgttcctggagctggacacgaatttgcccgccaaccgagtgcccgcgggntgngagaaacgactctgcgccgccgctgcctccatcctgggcaaacctgcggaccgcgtgaacgtgacggtacggccgggcctggccatggcgctgagcgggtccaccgagccctgcgcgcagtgttccatctcctccatcggcgtagtggggcaccgcgagggacaaccgcagccacagcgcccatttcttttgagttttttcaccaaggagctaagcccctgccagggacccgatanttattccntttttttccctttgg

SEQ ID NO: 90 - DNA, 666 bp, Homo sapiens
  d-dopachrome tautomerase (DDT) gene.
gatcccggtgccagggaccctgcccagttccaggcgtcgcctaacccagaaacgactgggcgccgcgtcctggaaaggccccagcgcacggacatctgaggagctgtttccgttcctctgcccgccatgccgttcctggagctggacacgaatttgcccgccaaccgagtgcccgcggggctggagaaacgactctgcgccgccgctgcctccatcctgggcaaacctgcggaccgcgtgaacgtgacggtacggccgggcctggccatggcgctgagcgggtccaccgagccctgcgcgcagctgtccatctcctccatcggcgtagtgggcaccgcggaggacaaccgcagccacagcgcccacttctttgagtttctcaccaaggagctagccctgggccaggaccggatacttatccgctttttccccttggagtcctggcagattggcaagatagggacggtcatgacttttttatgattgggcacggagggatccagggcatctgtgaactggctgcttcttccagagagatctcttggcagagtgagggcctggagataaccagctttggattatcccgcatgcaacattcctgtgatcacataatcctcttcttcatcctcatatgaaataaatgaagagagcttcctcattcaaaaa

SEQ ID NO: 91 - DNA, 443 bp, Homo sapiens
  3' terminal sequence. prolactin (PRL) gene.
  modified_base (3): a, t, c or g
  modified_base (383): a, t, c or g
gantttgatgtctctaaggagtcagtttttattttttaagaggagacctgttacacccaagcatggattcaaaagagatacaactaaaagaagcttgcaatggaacggatcattaaggaccttctcagaaatagatgaaatggatgtgggcttagcagttgttgttgtggatgattcgggcacttcagggagcttgaggataattgtcgattttatgtgaatccctgcgtaggcaatgggagaggttataataaggcaggaaagggcgagactcttcatcagccatctgcaggggatgggaagtccccgacccagacagggtagatctcattttctttgggttttcagggatgaacctgggcttgactatccagcttccatgnccctcttggaagcccttttggttttgctccctcaatcttctacagcttttgggttagggt

SEQ ID NO: 92 - DNA, 243 bp, Homo sapiens
  5' terminal sequence. prolactin (PRL) gene.
  modified_base (229): a, t, c or g
gaagaatcggaacatacaggctttgatatcaaaggtttataaagccaatatctgggaaagagaaaaccgtgagacttccagatcttctctggtgaagtgtgtttcctgcaacgatcacgaacatgaacatcaaaggatcgccatgggaaagggtccctcctgctgctgctgggtgttcaaacctgctcctgtgccagagcgtgggcccccttggcccatctgtcccggncgggcttgcccgat

SEQ ID NO: 93 - DNA, 833 bp, Homo sapiens
  prolactin (PRL) gene.
aaacatgaacatcaaaggatcgccatggaaagggtccctcctgctgctgctggtgtcaaacctgctgctgtgccagagcgtggcccccttgcccatctgtcccggcggggctgcccgatgccaggtgacccttcgagacctgtttgaccgcgccgtcgtcctgtcccactacatccataacctctcctcagaaatgttcagcgaattcgataaacggtatacccatggccgggggttcattaccaaggccatcaacagctgccacacttcttcccttgccacccccgaagacaaggagcaagcccaacagatgaatcaaaaagactttctgagcctgatagtcagcatattgcgatcctggaatgagcctctgtatcatctggtcacggaagtacgtggtatgcaagaagccccggaggctatcctatccaaagctgtagagattgaggagcaaaccaaacggcttctagagggcatggagctgatagtcagccaggttcatcctgaaaccaaagaaaatgagatctaccctgtctggtcgggacttccatccctgcagatggctgatgaagagtctcgcctttctgcttattataacctgctccactgcctacgcagggattcacataaaatcgacaattatctcaagctcctgaagtgccgaatcatccacaacaacaactgctaagcccacatccatttcatctatttctgagaaggtccttaatgatccgttccattgcaagcttcttttagttgtatctcttttgaatccatgcttgggtgtaacaggtctcctcttaaaaaataaaaactgactcgttagagacatc

SEQ ID NO: 94 - DNA, 304 bp, Homo sapiens
  3' terminal sequence. prolactin receptor (PRLR) gene.
actaagcagtgtgcttttatttcattgaacacatagttttataactaacagcaaaaagtaaatctacaaatcacagttaggaaacataatgatttgttctggaatcagctgctggagaaagaggcaagtggttaaaaatggagcatgaaaggagctgggagctttagtagtgtcagtctgactacattcttgaggcatttcacgtactctgtagtgttacctgaagaaaaatcacattttaaccaatcattccattagtcaagctatcagtgaaaggagtgtgtaaaacatgcgggatcccggg

SEQ ID NO: 95 - DNA, 366 bp, Homo sapiens
  5' terminal sequence. prolactin receptor (PRLR) gene.
  modified_base (34): a, t, c or g
  modified_base (54): a, t, c or g
  modified_base (87): a, t, c or g
  modified_base (276): a, t, c or g
  modified_base (282): a, t, c or g
  modified_base (328): a, t, c or g
  modified_base (345): a, t, c or g
gaggtcattgagaagccagagaatcctgaaacancccacacctggaacccccantgcataagcatggaaggcaaaatcccctatttncatgctggtggatccaaatgttcaacatggcccttaccacagcccagccagcacaaccccagatcctcttaccacaatattactgatgtgtgtgagctggctgtgggccctgcaggtgcaccggccactctgttgaatgaagcaggtaaagatgctttaaaatcctctcaaaccattaagtctagagangagggnaaggcaacccaggcagagggaggtaggaaagcttccattcttgagnactgaccagggttacgncctgggttgcttgccccaggg

SEQ ID NO: 96 - DNA, 2723 bp, Homo sapiens
  prolactin receptor (PRLR) gene.
ggaggctgaaatccccagacgccggttttctgggctgggctttctgcttactcactccttctccctctttctggattttaccgaccgttcgcgaaacagctttccacacaatggagcttcatgtcctcgtgcaggaagtactcatcgactgatgtggcagactttgctccctgacaaaactaaagaactctcctattcatggaggcgaacactgaggatgctttccacatgaaccctgaagtgaacttctgatacatttcctgcagcaagagaaggcagccaacatgaaggaaaatgtggcatctgcaaccgttttcactctgctactttttctcaacacctgccttctgaatggacagttacctcctggaaaacctgagatctttaaatgtcgttctcccaataaggaaacattcacctgctggtggaggcctgggacagatggaggacttcctaccaattattcactgacttaccacagggaaggagagacactcatgcatgaatgtccagactacataaccggtggccccaactcctgccactttggcaagcagtacacctccatgtggaggacatacatcatgatggtcaatgccactaaccagatgggaagcagtttctcggatgaactttatgtggacgtgacttacatagttcagccagaccctcctttggagctggctgtggaagtaaaacagccagaagacagaaaaccctacctgtggattaaatggtctccacctaccctgattgacttaaaaactggttggttcacgctcctgtatgaaattcgattaaaacccgagaaagcagctgagtgggagatccattttgctgggcagcaaacagagtttaagattctcagcctacatccaggacagaaataccttgtccaggttcgctgcaaaccagaccatggatactggagtgcatggagtccagcgaccttcattcagatacctagtgacttcaccatgaatgatacaaccgtgtggatctctgtggctgtcctttctgctgtcatctgtttgattattgtctgggcagtggctttgaagggctatagcatggtgacctgcatctttccgccagttcctgggccaaaaataaaaggatttgatgctcatctgttggagaagggcaagtctgaagaactactgagtgccttgggatgccaagactttcctcccacttctgactatgaggacttgctggtggagtatttagaagtagatgatagtgaggaccagcatctaatgtcagtccattcaaaagaacacccaagtcaaggtatgaaacccacatacctggatcctgacactgactcaggccgggggagctgtgacagcccttcccttttgtctgaaaagtgtgaggaaccccaggccaatccctccacattctatgatcctgaggtcattgagaagccagagaatcctgaaacaacccacacctgggacccccagtgcataagcatggaaggcaaaatcccctattttcatgctggtggatccaaatgttcaacatggcccttaccacagcccagccagcacaaccccagatcctcttaccacaatattactgatgtgtgtgagctggctgtgggccctgcaggtgcaccggccactctgttgaatgaagcaggtaaagatgctttaaaatcctctcaaaccattaagtctagagaagagggaaaggcaacccagcagagggaggtagaaagcttccattctgagactgaccaggatacgccctggctgctgccccaggagaaaaccccctttggctccgctaaacccttggattatgtggagattcacaaggtcaacaaagatggtgcattatcattgctaccaaaacagagagagaacagcggcaagcccaagaagcccgggactcctgagaacaataaggagtatgccaaggtgtccggggtcatggataacaacatcctggtgttggtgccagatccacatgctaaaaacgtggcttgctttgaagaatcagccaaagaggccccaccatcacttgaacagaatcaagctgagaaagccctggccaacttcactgcaacatcaagcaagtgcaggctccagctgggtggtttggattacctggatcccgcatgttttacacactcctttcactgatagcttgactaatggaatgattggttaaaatgtgatttttcttcaggtaacactacagagtacgtgaaatgctcaagaatgtagtcagactgacactactaaagctcccagctcctttcatgctccatttttaaccacttgcctctttctccagcagctgattccagaacaaatcattatgtttcctaactgtgatttgtagatttactttttgctgttagttataaaactatgtgttcaatgaaataaaagcacactgcttagtattcttgagggacaatgccaataggtatatcctctggaaaaggctttcatgatttggcatgggacagacggaaatgaaattgtcaaaattgtttaccatagaaagatgacaaaagaaaattttccacataggaaaatgccatgaaaattgcttttgaaaaacaactgcataacctttacactcctcgtccattttattaggattacccaaatataaccatttaaagaaagaatgcattccagaacaaattgtttacataagttcctataccttactgacacattgctgatatgcaagtaagaaat

SEQ ID NO: 97 - DNA, 365 bp, Homo sapiens
  3' terminal sequence. interleukin 2 receptor, beta (IL2RB) gene.
  modified_base (269): a, t, c or g
  modified_base (287): a, t, c or g
  modified_base (330): a, t, c or g
  modified_base (352): a, t, c or g
gtacagttaccttttatttatagcgaaaatgggttttttcatttacagagtaacaaagatttttctttaaataaatgtatttcaacgaaaatgaactgacttaaagaaaaaatattaaggaaataatcacaaagatggtacacacggatcattaaaagatacggatgtataggatacatatgtcacaaatgattaaggacttaaaaaatgtaaccctcccaagaagtggggagcctcccaaagtgggggaagggcaaatacaatttccntttggggggggatagggngaccccctttgcagagaggggttaggtggggtttccccccggnacacacaggcaagggtttgggngccccttgtgggg

SEQ ID NO: 98 - DNA, 366 bp, Homo sapiens
  5' terminal sequence. interleukin 2 receptor, beta (IL2RB) gene.
  modified_base (1): a, t, c or g
  modified_base (286): a, t, c or g
  modified_base (313): a, t, c or g
  modified_base (337): a, t, c or g
  modified_base (350): a, t, c or g
  modified_base (358): a, t, c or g
  modified_base (364): a, t, c or g
nattcggcactagggggcacctgaccacacgcccccacaggctctgaccagcagcctatgagggggtttggcaccaagctctgtccaatcaggtaggctgggctgaactagccaatcagatcaactctgtcttgggcgtttgaactcagggagggaggcccttgggagcaggtgcttgtggacaaggctccacaagcgttgagccttggaaaggtagacaagcgttgagccactaagcagaggaccttgggttcccaatacaaaaatacctactgctgagaggggntgctgaccattttggtcaaggatttcngtttgccttatatcccaaataaantcccttttttttnaggttttnttagtntt

SEQ ID NO: 99 - DNA, 4034 bp, Homo sapiens
  interleukin 2 receptor, beta (IL2RB) gene.
gcagccagagctcagcagggccctggagagatggccacggtcccagcaccggggaggactggagagcgcgcgctgccaccgccccatgtctcagccagggcttccttcctcggctccaccctgtggatgtaatggcggcccctgctctgtcctggcgtctgcccctcctcatcctcctcctgcccctggctacctcttgggcatctgcagcggtgaatggcacttcccagttcacatgcttctacaactcgagagccaacatctcctgtgtctggagccaagatggggctctgcaggacacttcctgccaagtccatgcctggccggacagacggcggtggaaccaaacctgtgagctgctccccgtgagtcaagcatcctgggcctgcaacctgatcctcggagccccagattctcagaaactgaccacagttgacatcgtcaccctgagggtgctgtgccgtgagggggtgcgatggagggtgatggccatccaggacttcaagccctttgagaaccttcgcctgatggcccccatctccctccaagttgtccacgtggagacccacagatgcaacataagctgggaaatctcccaagcctcccactactttgaaagacacctggagttcgaggcccggacgctgtccccaggccacacctgggaggaggcccccctgctgactctcaagcagaagcaggaatggatctgcctggagacgctcaccccagacacccagtatgagtttcaggtgcgggtcaagcctctgcaaggcgagttcacgacctggagcccctggagccagcccctggccttcaggacaaagcctgcagcccttgggaaggacaccattccgtggctcggccacctcctcgtgggcctcagcggggcttttggcttcatcatcttagtgtacttgctgatcaactgcaggaacaccgggccatggctgaagaaggtcctgaagtgtaacaccccagacccctcgaagttcttttcccagctgagctcagagcatggaggagacgtccagaagtggctctcttcgcccttcccctcatcgtccttcagccctggcggcctggcacctgagatctcgccactagaagtgctggagagggacaaggtgacgcagctgctcctgcagcaggacaaggtgcctgagcccgcatccttaagcagcaaccactcgctgaccagctgcttcaccaaccagggttacttcttcttccacctcccggatgccttggagatagaggcctgccaggtgtactttacttacgacccctactcagaggaagaccctgatgagggtgtggccggggcacccacagggtcttccccccaacccctgcagcctctgtcaggggaggacgacgcctactgcaccttcccctccagggatgacctgctgctcttctcccccagtctcctcggtggccccagccccccaagcactgcccctgggggcagtggggccggtgaagagaggatgcccccttctttgcaagaaagagtccccagagactgggacccccagcccctggggcctcccaccccaggagtcccagacctggtggattttcagccaccccctgagctggtgctgcgagaggctggggaggaggtccctgacgctggccccagggagggagtcagtttcccctggtccaggcctcctgggcagggggagttcagggcccttaatgctcgcctgcccctgaacactgatgcctacttgtccctccaagaactccagggtcaggacccaactcacttggtgtagacagatggccagggtgggaggcaggcagctgcctgctctgcgccgagcctcagaaggaccctgttgagggtcctcagtccactgctgaggacactcagtgtccagttgcagctggacttctccacccggatggcccccacccagtcctgcacacttggtccatccatttccaaacctccactgctgctcccgggtcctgctgcccgagccaggaactgtgtgtgttgcaggggggcagtaactccccaactccctcgttaatcacaggatcccacgaatttaggctcagaagcatcgctcctctccagccctgcagctattcaccaatatcagtcctcgcggctctccagggctccctgccctgacctcttccctgggttttctgccccagcctcctccttccctcccctccccgtccacagggcagcctgagcgtgctttccaaaacccaaatatggccacgctccccctcggttcaaaaccttgcacaggtcccactgccctcagccccacttctcagcctggtacttgtacctccggtgtcgtgtggggacatccccttctgcaatcctccctaccgtcctcccgagccactcagagctccctcacaccccctctgttgcacatgctattccctggggctgctgtgcgctccccctcatctaggtgacaaacttccctgactcttcaagtgccggttttgcttctcctggagggaagcactgcctcccttaatctgccagaaacttctagcgtcagtgctggagggagaagctgtcagggacccagggcgcctggagaaagaggccctgttactattcctttgggatctctgaggcctcagagtgcttggctgctgtatctttaatgctggggcccaagtaagggcacagatccccccacaaagtggatgcctgctgcatcttcccacagtggcttcacagacccacaagagaagctgatggggagtaaaccctggagtccgaggcccaggcagcagccccgcctagtggtgggccctgatgctgccaggcctgggacctcccactgccccctccactggaggggtctcctctgcagctcagggactggcacactggcctccagaagggcagctccacagggcagggcctcattatttttcactgccccagacacagtgcccaacaccccgtcgtataccctggatgaacgaattaattacctggcaccacctcgtctgggctccctgcgcctgacattcacacagagaggcagagtcccgtgcccattaggtctggcatgccccctcctgcaaggggctcaaccccctaccccgacccctccacgtatctttcctaggcagatcacgttgcaatggctcaaacaacattccaccccagcaggacagtgaccccagtcccagctaactctgacctgggagccctcaggcacctgcacttacaggccttgctcacagctgattgggcacctgaccacacgcccccacaggctctgaccagcagcctatgagggggtttggcaccaagctctgtccaatcaggtaggctgggcctgaactagccaatcagatcaactctgtcttgggcgtttgaactcagggagggaggcccttgggagcaggtgcttgtggacaaggctccacaagcgttgagccttggaaaggtagacaagcgttgagccactaagcagaggaccttgggttcccaatacaaaaatacctactgctgagagggctgctgaccatttggtcaggattcctgttgcctttatatccaaaataaactcccctttcttgaggttgtctgagtcttgggtctatgccttgaaaaaagctgaattattggacagtctcacctcctgccatagggtcctgaatgtttcagaccacaaggggctccacacctttgctgtgtgttctggggcaacctactaatcctctctgcaagtcggtctccttatccccccaaatggaaattgtatttgccttctccactttgggaggctcccacttcttgggagggttacattttttaagtcttaatcatttgtgacatatgtatctatacatccgtatcttttaatgatccgtgtgtaccatctttgtgattatttccttaatattttttctttaagtcagttcattttcgttgaaatacatttataaagaaaaatctttgttactctgtaaatgaaaaaacccattttcgctataaataaaaggtaactgtacaaaataagtacaat

SEQ ID NO: 100 - DNA, 444 bp, Homo sapiens
  3' terminal sequence. gata-binding protein 3 (GATA3) gene.
  modified_base (342): a, t, c or g
  modified_base (430): a, t, c or g
tttctatttttttattttcttttaatgcatcaaacaactgtggccagtgaaaggaaacaaaactggcagtttgtccatttgaatatcagacctagtttcttcttaatttccacactatttctcccatattccttaaacttcttggcatccttcatgccttacagctacccagatgcaataaagtcattgtacagtatttcttacaatataagttatatggcaatgttcaggcatttttttttttcacaggcactaggaggaccctgtttaaatgggggatatgaggtcaggaatgggcttattcacaggatggggggtcccggattcaggtgggttggggancacaggacaccacaggtgaggctccctttgccaaaggtggggccaaacataattttggcttttctggcccttcaaaaacatatttccntcgcgttttggggg

SEQ ID NO: 101 - DNA, 396 bp, Homo sapiens
  5' terminal sequence. gata-binding protein 3 (GATA3) gene.
  modified_base (32): a, t, c or g
  modified_base (331): a, t, c or g
  modified_base (350): a, t, c or g
  modified_base (382): a, t, c or g
  modified_base (387): a, t, c or g
gcaatggggaccctgtctgcaatgcctgtggntctactacaagcttcacaatattaacagacccctgactatgaagaaggaaggcatccagaccagaaaccgaaaaatgtctagcaaatccaaaaagtgcaaaaagtgcatgactcactggaggacttccccaagaacagctcgtttaacccggccgccctctccagacacatgtcctccctgagccacatctcgcccttcagccactccagccacatgctgaccacggcccacgccgatggcacccgccatccagcctgtcctttgggaccacaccacccctccagctgggtcaccgccntgggtttagagccttgttngatggttcacagggggcccccagcgagagttncctgnagttccttt

SEQ ID NO: 102 - DNA, 416 bp, Homo sapiens
  5' terminal sequence. placental growth factor, vascular endothelial growth factor-related protein (PGF) gene.
  modified_base (400): a, t, c or g
attcggcactaggggagacccaagggcagggggaagaggaggagagagaagcagagacccacagactgccacctgtgcggcgatgctgttccccggagtaacccaccccttggaggagagagaccccgcacccggctcgtgtatttattaccgtcacactcttcagtgactcctgctggtacctgccctctatttattagccaactgtttccctgctgaatgcctcgctcccttcaagacgaggggcagggaaggacaggaccctcaggaattcagtgccttcaacaacgtgagagaaagagagaagccagccacagacccctggggagctttccgcttttgaaagaagcaagacaagttggccttgttgaggggcaaggttagggcccaggaggccctngggaagtttttcaggg

SEQ ID NO: 103 - DNA, 1645 bp, Homo sapiens
  placental growth factor, vascular endothelial growth factor-related protein (PGF) gene.
gggattcgggccgcccagctacgggaggacctggagtggcactgggcgcccgacggaccatccccgggacccgcctgcccctcggcgccccgccccgccgggccgctccccgtcgggttccccagccacagccttacctacgggctcctgactccgcaaggcttccagaagatgctcgaaccaccggccggggcctcggggcagcagtgagggaggcgtccagccccccactcagctcttctcctcctgtgccaggggctccccgggggatgagcatggtggttttccctcggagccccctggctcgggacgtctgagaagatgccggtcatgaggctgttcccttgcttcctgcagctcctggccgggctggcgctgcctgctgtgcccccccagcagtgggccttgtctgctgggaacggctcgtcagaggtggaagtggtacccttccaggaagtgtggggccgcagctactgccgggcgctggagaggctggtggacgtcgtgtccgagtaccccagcgaggtggagcacatgttcagcccatcctgtgtctccctgctgcgctgcaccggctgctgcggcgatgagaatctgcactgtgtgccggtggagacggccaatgtcaccatgcagctcctaaagatccgttctggggaccggccctcctacgtggagctgacgttctctcagcacgttcgctgcgaatgccggcctctgcgggagaagatgaagccggaaaggtgcggcgatgctgttccccggaggtaacccaccccttggaggagagagaccccgcacccggctcgtgtatttattaccgtcacactcttcagtgactcctgctggtacctgccctctatttattagccaactgtttccctgctgaatgcctcgctcccttcaagacgaggggcagggaaggacaggaccctcaggaattcagtgccttcaacaacgtgagagaaagagagaagccagccacagacccctgggagcttccgctttgaaagaagcaagacacgtggcctcgtgaggggcaagctaggccccagaggccctggaggtctccaggggcctgcagaaggaaagaagggggccctgctacctgttcttgggcctcaggctctgcacagacaagcagcccttgctttcggagctcctgtccaaagtagggatgcggattctgctggggccgccacggcctggtggtgggaaggccggcagcgggcggaggggattcagccacttccccctcttcttctgaagatcagaacattcagctctggagaacagtggttgcctgggggcttttgccactccttgtcccccgtgatctcccctcacactttgccatttgcttgtactgggacattgttctttccggccgaggtgccaccaccctgcccccactaagagacacatacagagtgggccccgggctggagaaagagctgcctggatgagaaacagctcagccagtggggatgaggtcaccaggggaggagcctgtgcgtcccagctgaaggcagtggcaggggagcaggttccccaagggccctggcacccccacaagctgtccctgcagggccatctgactgccaagccagattctcttgaataaagtattctagtgtggaaacgc

SEQ ID NO: 104 - DNA, 309 bp, Homo sapiens
  5' terminal sequence. ubiquitin protein ligase e3a (human papilloma virus e6-associated protein, angelman syndrome) (UBE3A) gene.
  modified_base (8): a, t, c or g
  modified_base (112): a, t, c or g
ttcggcanaggggaaatgaagcctgcacgaatgagttttgtgcttcctgtccaacttttcttcgtatggataataatgcagcagctattaaagccctcgagctttataagantagggcaaaactctgtgatcctcatccctccaagaaaggagcaagctcagcttaccttgagaactcgaaaggtgcccccaacaactcctgctctgagataaaaatgaacaaggaaagggcgctaggaattggattttaaagatgtgacttactttaacaggaaggaggaagggtattatggaaaattttctttggac

SEQ ID NO: 105 - DNA, 2628 bp, Homo sapiens
  ubiquitin protein ligase e3a (human papilloma virus e6-associated protein, angelman syndrome) (UBE3A) gene.
atggagaagctgcaccagtgttattggaaatcaggagaacctcagtctgacgacattgaagctagccgaatgaagcgagcagctgcaaagcatctaatagaacgctactaccaccagttaactgagggctgtggaaatgaagcctgcacgaatgagttttgtgcttcctgtccaacttttcttcgtatggataataatgcagcagctattaaagccctcgagctttataagattaatgcaaaactctgtgatcctcatccctccaagaaaggagcaagctcagcttaccttgagaactcgaaaggtgcccccaacaactcctgctctgagataaaaatgaacaagaaaggcgctagaattgattttaaagatgtgacttacttaacagaagagaaggtatatgaaattcttgaattatgtagagaaagagaggattattcccctttaatccgtgttattggaagagttttttctagtgctgaggcattggtacagagcttccggaaagttaaacaacacaccaaggaagaactgaaatctcttcaagcaaaagatgaagacaaagatgaagatgaaaaggaaaaagctgcatgttctgctgctgctatggaagaagactcagaagcatcttcctcaaggataggtgatagctcacagggagacaacaatttgcaaaaattaggccctgatgatgtgtctgtggatattgatgccattagaagggtctacaccagattgctctctaatgaaaaaattgaaactgcctttctcaatgcacttgtatatttgtcacctaacgtggaatgtgacttgacgtatcacaatgtatactctcgagatcctaattatctgaatttgttcattatcggaatggagaatagaaatctccacagtcctgaatatctggaaatggctttgccattattttgcaaagcgatgagcaagctaccccttgcagcccaaggaaaactgatcagactgtggtctaaatacaatgcagaccagattcggagaatgatggagacatttcagcaacttattacttataaagtcataagcaatgaatttaacagtcgaaatctagtgaatgatgatgatgccattgttgctgcttcgaagtgcttgaaaatggtttactatgcaaatgtagtgggaggggaagtggacacaaatcacaatgaagaagatgatgaagagcccatccctgagtccagcgagctgacacttcaggaacttttgggagaagaaagaagaaacaagaaaggtcctcgagtggaccccctggaaactgaacttggtgttaaaaccctggattgtcgaaaaccacttatcccttttgaagagtttattaatgaaccactgaatgaggttctagaaatggataaagattatacttttttcaaagtagaaacagagaacaaattctcttttatgacatgtccctttatattgaatgctgtcacaaagaatttgggattatattatgacaatagaattcgcatgtacagtgaacgaagaatcactgttctctacagcttagttcaaggacagcagttgaatccatatttgagactcaaagttagacgtgaccatatcatagatgatgcacttgtccggctagagatgatcgctatggaaaatcctgcagacttgaagaagcagttgtatgtggaatttgaaggagaacaaggagttgatgagggaggtgtttccaaagaattttttcagctggttgtggaggaaatcttcaatccagatattggtatgttcacatacgatgaatctacaaaattgttttggtttaatccatcttcttttgaaactgagggtcagtttactctgattggcatagtactgggtctggctatttacaataactgtatactggatgtacattttcccatggttgtctacaggaagctaatggggaaaaaaggaacttttcgtgacttgggagactctcacccagttctatatcagagtttaaaagatttattggagtatgaagggaatgtggaagatgacatgatgatcactttccagatatcacagacagatctttttggtaacccaatgatgtatgatctaaaggaaaatggtgataaaattccaattacaaatgaaaacaggaaggaatttgtcaatctttattctgactacattctcaataaatcagtagaaaaacagttcaaggcttttcggagaggttttcatatggtgaccaatgaatctcccttaaagtacttattcagaccagaagaaattgaattgcttatatgtggaagccggaatctagatttccaagcactagaagaaactacagaatatgacggtggctataccagggactctgttctgattagggagttctgggaaatcgttcattcatttacagatgaacagaaaagactcttcttgcagtttacaacgggcacagacagagcacctgtgggaggactaggaaaattaaagatgattatagccaaaaatggcccagacacagaaaggttacctacatctcatacttgctttaatgtgcttttacttccggaatactcaagcaaagaaaaacttaaagagagattgttgaaggccatcacgtatgccaaaggatttggcatgctgtaa

SEQ ID NO: 106 - DNA, 363 bp, Homo sapiens
  3' terminal sequence. oncogene tc21 (TC21) gene.
  modified_base (155): a, t, c or g
  modified_base (229): a, t, c or g
  modified_base (247): a, t, c or g
  modified_base (253): a, t, c or g
  modified_base (275): a, t, c or g
  modified_base (306): a, t, c or g
  modified_base (339): a, t, c or g
  modified_base (346): a, t, c or g
aattttaattctagcacctgaagctatacaagggtatgctctataaacttcatgggactgtcgtacacacttgataaagtgacaactgtgcaataccacttagcatctcaaaatcaggaacatactattgaattgcttaaacacaatccacaganttaaaaacaaaatcaggatgccatccacagttatactaattatccattaaaaggcttacacttaatacttgaantaacaatcaatatctagncggggnatactggaaagtggatttcagnggtctcatcctgttggtactctattgggggngggtttcttgaggtaggttatggtggactgggnccaaggntggggggtaccacccag

SEQ ID NO: 107 - DNA, 408 bp, Homo sapiens
  5' terminal sequence. oncogene tc21 (TC21) gene.
  modified_base (406): a, t, c or g
gaattgaatctacaaaagtgaaccatctcagacctttactgatactacaacttttgttttctgatggccaaaataccaaatgcctgttgtatttatggattaaaaactgcttataaaaccctgtgttactactcctactcttggagatgataatattctatgtggtcaaatatttggactcatttaggacttagatatttcagtgtacttgattttttaatttaactctttttcacagccacgctaagggtaaaaaggaataatttccttctgtcttccttttcaagtatttctgggtaagggattcaaaaaactaaaactgtttttgtttgtaatataaaatatgggattgatctttccggggtcagagatgattaatgtttttgctatatacttttatacatgntt

SEQ ID NO: 108 - DNA, 612 bp, Homo sapiens
  oncogene tc21 (TC21) gene.
atggccgcggcggctggcggacggctccggcaggagaagtaccggctcgtggtggtcggcgggggcggcgtgggcaagtcggcgctcaccatccagttcatccagtcctattttgtaacggattatgatccaaccattgaagattcttacacaaagcagtgtgtgatagatgacagagcagcccggctagatattttggatacagcaggacaagaagagtttggagccatgagagaacagtatatgaggactggcgaaggcttcctgttggtcttttcagtcacagatagaggcagttttgaagaaatctataagtttcaaagacagattctcagagtaaaggatcgtgatgagttcccaatgattttaattggtaataaagcagatctggatcatcaaagacaggtaacacaggaagaaggacaacagttagcacggcagcttaaggtaacatacatggaggcatcagcaaagattaggatgaatgtagatcaagctttccatgaacttgtccgggttatcaggaaatttcaagagcaggaatgtcctccttcaccagaaccaacacggaaagaaaaagacaagaaaggctgccattgtgtcattttctag

SEQ ID NO: 109 - DNA, 592 bp, Homo sapiens
  5' terminal sequence. tyrosine kinase with immunoglobulin and epidermal growth factor homology domains (TIE) gene.
  modified_base (1): a, t, c or g
  modified_base (462): a, t, c or g
  modified_base (487): a, t, c or g
  modified_base (533): a, t, c or g
ngtcggagagaacctagcctccaagattgcagacttcggcctttctcggggagaggaggtttatgtgaagaagacgatggggcgtctccctgtgcgctggatggccattgagtccctgaactacagtgtctataccaccaagagtgatgtctggtcctttggagtccttctttgggagatagtgagccttggaggtacaccctactgtggcatgacctgtgccgagctctatgaaaagctgccccagggctaccgcatggagcagcctcgaaactgtgacgatgaagtgtacgagctgatgcgttcagtgctggcgggaccgtccctatgagcgacccccctttgcccagattgcgctaacagctaggccgcatgctgggaagccagggaaggcctatgtgaacatgttcgctgtttgagaacttcaattaacgcgggcattgatgccacagctgaggaggnctgagctgccatccagccagaactnggtctgttggccggagcaaatttggtgtctaaactgtgaccagttnaaccttaaagctttgatttaagttgcttaaggatttttttaattaagggagaaaaattt

SEQ ID NO: 110 - DNA, 3845 bp, Homo sapiens
  tyrosine kinase with immunoglobulin and epidermal growth factor homology domains (TIE) gene.
cgctcgtcctggctggcctgggtcggcctctggagtatggtctggcgggtgccccctttcttgctccccatcctcttcttggcttctcatgtgggcgcggcggtggacctgacgctgctggccaacctgcggctcacggacccccagcgcttcttcctgacttgcgtgtctggggaggccggggcggggaggggctcggacgcctggggcccgcccctgctgctggagaaggacgaccgtatcgtgcgcaccccgcccgggccacccctgcgcctggcgcgcaacggttcgcaccaggtcacgcttcgcggcttctccaagccctcggacctcgtgggcgtcttctcctgcgtgggcggtgctggggcgcggcgcacgcgcgtcatctacgtgcacaacagccctggagcccacctgcttccagacaaggtcacacacactgtgaacaaaggtgacaccgctgtactttctgcacgtgtgcacaaggagaagcagacagacgtgatctggaagagcaacggatcctacttctacaccctggactggcatgaagcccaggatgggcggttcctgctgcagctcccaaatgtgcagccaccatcgagcggcatctacagtgccacttacctggaagccagccccctgggcagcgccttctttcggctcatcgtgcggggttgtggggctgggcgctgggggccaggctgtaccaaggagtgcccaggttgcctacatggaggtgtctgccacgaccatgacggcgaatgtgtatgcccccctggcttcactggcacccgctgtgaacaggcctgcagagagggccgttttgggcagagctgccaggagcagtgcccaggcatatcaggctgccggggcctcaccttctgcctcccagacccctatggctgctcttgtggatctggctggagaggaagccagtgccaagaagcttgtgcccctggtcattttggggctgattgccgactccagtgccagtgtcagaatggtggcacttgtgaccggttcagtggttgtgtctgcccctctgggtggcatggagtgcactgtgagaagtcagaccggatcccccagatcctcaacatggcctcagaactggagttcaacttagagacgatgccccggatcaactgtgcagctgcagggaaccccttccccgtgcggggcagcatagagctacgcaagccagacggcactgtgctcctgtccaccaaggccattgtggagccagagaagaccacagctgagttcgaggtgccccgcttggttcttgcggacagtgggttctgggagtgccgtgtgtccacatctggcggccaagacagccggcgcttcaaggtcaatgtgaaagtgccccccgtgcccctggctgcacctcggctcctgaccaagcagagccgccagcttgtggtctccccgctggtctcgttctctggggatggacccatctccactgtccgcctgcactaccggccccaggacagtaccatggactggtcgaccattgtggtggaccccagtgagaacgtgacgttaatgaacctgaggccaaagacaggatacagtgttcgtgtgcagctgagccggccaggggaaggaggagagggggcctgggggcctcccaccctcatgaccacagactgtcctgagcctttgttgcagccgtggttggagggctggcatgtggaaggcactgaccggctgcgagtgagctggtccttgcccttggtgcccgggccactggtgggcgacggtttcctgctgcgcctgtgggacgggacacgggggcaggagcggcgggagaacgtctcatccccccaggcccgcactgccctcctgacgggactcacgcctggcacccactaccagctggatgtgcagctctaccactgcaccctcctgggcccggcctcgccccctgcacacgtgcttctgccccccagtgggcctccagccccccgacacctccacgcccaggccctctcagactccgagatccagctgacatggaagcacccggaggctctgcctgggccaatatccaagtacgttgtggaggtgcaggtggctgggggtgcaggagacccactgtggatagacgtggacaggcctgaggagacaagcaccatcatccgtggcctcaacgccagcacgcgctacctcttccgcatgcgggccagcattcaggggctcggggactggagcaacacagtagaagagtccaccctgggcaacgggctgcaggctgagggcccagtccaagagagccgggcagctgaagagggcctggatcagcagctgatcctggcggtggtgggctccgtgtctgccacctgcctcaccatcctggccgcccttttaaccctggtgtgcatccgcagaagctgcctgcatcggagacgcaccttcacctaccagtcaggctcgggcgaggagaccatcctgcagttcagctcagggaccttgacacttacccggcggccaaaactgcagcccgagcccctgagctacccagtgctagagtgggaggacatcacctttgaggacctcatcggggaggggaacttcggccaggtcatccgggccatgatcaagaaggacgggctgaagatgaacgcagccatcaaaatgctgaaagagtatgcctctgaaaatgaccatcgtgactttgcgggagaactggaagttctgtgcaaattggggcatcaccccaacatcatcaacctcctgggggcctgtaagaaccgaggttacttgtatatcgctattgaatatgccccctacgggaacctgctagattttctgcggaaaagccgggtcctagagactgacccagcttttgctcgagagcatgggacagcctctacccttagctcccggcagctgctgcgtttcgccagtgatgcggccaatggcatgcagtacctgagtgagaagcagttcatccacagggacctggctgcccggaatgtgctggtcggagagaacctagcctccaagattgcagacttcggcctttctcggggagaggaggtttatgtgaagaagacgatggggcgtctccctgtgcgctggatggccattgagtccctgaactacagtgtctataccaccaagagtgatgtctggtcctttggagtccttctttgggagatagtgagccttggaggtacaccctactgtggcatgacctgtgccgagctctatgaaaagctgccccagggctaccgcatggagcagcctcgaaactgtgacgatgaagtgtacgagctgatgcgtcagtgctggcgggaccgtccctatgagcgacccccctttgcccagattgcgctacagctaggccgcatgctggaagccaggaaggcctatgtgaacatgtcgctgtttgagaacttcacttacgcgggcattgatgccacagctgaggaggcctgagctgccatccagccagaacgtggctctgctggccggagcaaactctgctgtctaacctgtgaccagtctgacccttacagcctctgacttaagctgcctcaaggaatttttttaacttaagggagaaaaaaagggatctggggatggggtgggcttaggggaactgggttcccatgctttgtaggtgtctcatagctatcctgggcatccttctttctagttcagctgccccacaggtgtgtttcccatcccactgctcccccaacacaaacccccactccagctccttcgcttaagccagcactcacaccactaacatgccctgttcagctactcccactcccggcctgtcattcagaaaaaaataaatgttctaataagctccaaaaaaa

SEQ ID NO: 111 - DNA, 202 bp, Homo sapiens
  3' terminal sequence. autocrine motility factor receptor (AMFR) gene.
  modified_base (22): a, t, c or g
  modified_base (27): a, t, c or g
  modified_base (43): a, t, c or g
  modified_base (193): a, t, c or g
  modified_base (195): a, t, c or g
  modified_base (197): a, t, c or g
aaagcccttcaaggtttactcncccancttgcaaggcccacancttgttcaaggaccaaacccacaggctttagcactgcctaatttacttcaccaatgaatgaaaaccataaaccaaagcttgctgcctaaccactccccagggccagacgggacaaggaaatgctgagaggggaggggacccatggggcanantnatgag

SEQ ID NO: 112 - DNA, 450 bp, Homo sapiens
  5' terminal sequence. autocrine motility factor receptor (AMFR) gene.
  modified_base (257): a, t, c or g
  modified_base (349): a, t, c or g
  modified_base (394): a, t, c or g
attcaagtaccttttcctacacagcggtcagatagcatcagacctgcattgaacagtcctgtggaaaggccaagcagtgaccaggaagagggagaaacttctgctcagaccgagcgtgtgccactggacctcagtcctcgcctggaggagacgctggacttcggcgaggtggaagtggagcccagtgaggtggaagacttcgaggctcgtgggagcgctttctccaagtctgctgatgagagacagcgcatgtggtngcagcgtaaggacgaactcctccagcaagctcgcaaacgttttcttgaacaaaagttctgaagatgatgccggccttcagagagctttcctncccttcggaaaggtgccgttccttttgaaccccgtgaacccctgncgttcgaaaggattgcttggcttgcccgccgcgggaaacggaggctttcagaagca

SEQ ID NO: 113 - DNA, 1810 bp, Homo sapiens
  autocrine motility factor receptor (AMFR) gene.
ggggggaaggccaagcagtgaccaggaagagggagaaacttctgctcagaccgagcgtgtgccactggacctcagtcctcgcctggaggagacgctggacttcggcgaggtggaagtggagcccagtgaggtggaagacttcgaggctcgtgggagccgcttctccaagtctgctgatgagagacagcgcatgctggtcgcagcgtaaggacgaactcctccagcaagctcgcaaacgtttcttgaacaaaagttctgaagatgatgcggcctcagagagcttcctcccctcggaaggtgcgtcctctgaccccgtgaccctgcgtcgaaggatgctggctgccgcgcggaacggaggcttcagaagcagcagacctcctagcgctcccttgccttcctcagctgcctcctgcgccctgtgcccgactgactggaggaggcctgtcccaattctgccgctccatggaaaagcgggcttgactgcattgccgctgtataaagcatgtggtcttatagtgtttggacagctgataaatttaatccttctttgtaatactttctatgtgacatttctcttccccttagaaacactgcaaattttaactgtaggtatgatctcttctggtgttgactggactgcttggggtgggggacgatcaggaggaagtgagccagtcgcctgcctgcagcaggcagcttctactcctgcctcatgcatacgtcccacaaatgcaggtgtcctgagcaccacacccagtgggaagagtgtgggggaggcgcacagtgtgagcccgcccccacgtcgtggggtaacatctgttatcaaactgctgtcgttgttgtggaagcatgtagactgtgccagagccagacccacgggctcatgcacccctgagcagcagggcatcttggaaaaggaactcttggttcgatacctggagcagaggaggggaaagtccagggctatagggtgtgatgaagtcacccctttctgtcccactacatctgggactgactttccgagcctccagtccaaagccggcttgatttccgtgaactctggtgctcctgcatctcatgagtgtgccccatgggtcccctcccctctcagcatttccttgtcccgtctggacctggggagtggttaggcagcaagctttggtttatggttttcattcattggtgaagtaaattaggcagtgctaaagcctgtgggtttggtccttgaacaagatgtgggccttgcaagatgggagagtaaaccttgaagggctttattaaagaaataaaaaagaacttttgtatcttttatcctgggagcactgcgttttcctagctgtgttattcctggtttaattcagcagagaaggtaaggtgtgaacctacctgccttggagaggcccaggtcccaaatctcttcaaattcttcacatgtttaactttaaggatttgaaccatgaagtcataggttacagacctcagttttatgccccattggattacttttttttttttttttttttttttactctttgaaagctttgttttgtggtagtcgcttttgggaagaatccagtattatctacaattattggcaaagtttaaatgtattttacataacggaaagtttttagaatgttgaaaagtaattgaaaaaggtgataggtaaatttttaggcaaagataatttatttcaataaatctttcaaaagccttaccttgaaatgctgttagtaaatttctgtgcattttttttttttaatttgttttgctgagagcatagctatttgtttttattgtaaacccgccc

SEQ ID NO: 114 - DNA, 248 bp, Homo sapiens
  3' terminal sequence. homo sapiens mrna; cdna dkfzp434c136 (from clone dkfzp434c136) (EST R81127) gene.
  modified_base (40): a, t, c or g
  modified_base (60): a, t, c or g
  modified_base (66): a, t, c or g
  modified_base (70): a, t, c or g
  modified_base (103): a, t, c or g
  modified_base (142): a, t, c or g
  modified_base (154): a, t, c or g
  modified_base (157): a, t, c or g
  modified_base (183): a, t, c or g
  modified_base (237): a, t, c or g
gaaattccaaaatcactctagtttattcacataatatagnatttgattccattcttttgnactgtncccnacttttacaatgtgtacaatgtttcaccatgtnccaattaatggttgagctttaaatgaaaatattctggancttccatttatnggnatcaaccacaatagcaagacccccangaaatacttgatctaaactgggagggtccaacacaatttttttttttaatgggncttgccacctt

SEQ ID NO: 115 - DNA, 415 bp, Homo sapiens
  3' terminal sequence. b-cell cll/lymphoma 2 (BCL2) gene.
  modified_base (127): a, t, c or g
  modified_base (146): a, t, c or g
  modified_base (160): a, t, c or g
  modified_base (178): a, t, c or g
  modified_base (227): a, t, c or g
  modified_base (278): a, t, c or g
  modified_base (309): a, t, c or g
  modified_base (350): a, t, c or g
  modified_base (371): a, t, c or g
  modified_base (394): a, t, c or g
ttttttaaagcagctttcgaaatatcaaccacagcattaaacattgaacagagtacattccaaagttaatacagataaatggtatataatgcaataatgccacagagttattccatcaatgtttcanggctgattctaaactggangaaaaaaaaaattncctagtttatttgctgangatgtcacttcttttgttacttctttatagttccccaccattgattttntttttaatgccccggggtgtacaggataacccccatattccacaccggggnactttttttttgtcagggttttcaaataaanccaaactacagtgacaggataatgttttacaggtaattccntgggccggggggtcaattatncctggacacctcacttcaaggcntcctttgggggtttgggggcc

SEQ ID NO: 116 - DNA, 468 bp, Homo sapiens
  5' terminal sequence. b-cell cll/lymphoma 2 (BCL2) gene.
  modified_base (260): a, t, c or g
  modified_base (310): a, t, c or g
  modified_base (336): a, t, c or g
  modified_base (347): a, t, c or g
  modified_base (403): a, t, c or g
  modified_base (418): a, t, c or g
  modified_base (425): a, t, c or g
  modified_base (445): a, t, c or g
  modified_base (453): a, t, c or g
  modified_base (458): a, t, c or g
aattgtgccagaaaagcattttagcaatttatacaatatcatccagtaccttaagccctgattgtgtatattcatatattttggatacgcaccccccaactcccaatactggctctgtctgagtaagaaacagaatcctctggaacttgaggaagtgaacatttcggtgacttccgcatcaggaaggctagagttacccagagcatcaggccgccacaagtgcctgcttttaggagaccgaagtccgcagaacctgcctntgtcccagcttggaggcctggtcctgggaactgagccggggccctcactngcctcctccagggatgatcaacaggngcagtgtggtntccgaatgtctggaagcttgatgggagctcagaatttccactgttcaagaaagagncagtagaggggtgtngctgggnctgttcacctgggggccctncaggtagngcccntttttcacgt

SEQ ID NO: 117 - DNA, 6030 bp, Homo sapiens
  b-cell cll/lymphoma 2 (BCL2) gene.
gttggcccccgttacttttcctctgggaaatatggcgcacgctgggagaacagggtacgataaccgggagatagtgatgaagtacatccattataagctgtcgcagaggggctacgagtgggatgcgggagatgtgggcgccgcgcccccgggggccgcccccgcgccgggcatcttctcctcgcagcccgggcacacgccccatacagccgcatcccgggacccggtcgccaggacctcgccgctgcagaccccggctgcccccggcgccgccgcggggcctgcgctcagcccggtgccacctgtggtccacctgaccctccgccaggccggcgacgacttctcccgccgctaccgccgcgacttcgccgagatgtccaggcagctgcacctgacgcccttcaccgcgcggggacgctttgccacggtggtggaggagctcttcagggacggggtgaactgggggaggattgtggccttctttgagttcggtggggtcatgtgtgtggagagcgtcaaccgggagatgtcgcccctggtggacaacatcgccctgtggatgactgagtacctgaaccggcacctgcacacctggatccaggataacggaggctgggatgcctttgtggaactgtacggccccagcatgcggcctctgtttgatttctcctggctgtctctgaagactctgctcagtttggccctggtgggagcttgcatcaccctgggtgcctatctgggccacaagtgaagtcaacatgcctgccccaaacaaatatgcaaaaggttcactaaagcagtagaaataatatgcattgtcagtgatgttccatgaaacaaagctgcaggctgtttaagaaaaaataacacacatataaacatcacacacacagacagacacacacacacacaacaattaacagtcttcaggcaaaacgtcgaatcagctatttactgccaaagggaaatatcatttattttttacattattaagaaaaaaagatttatttatttaagacagtcccatcaaaactcctgtctttggaaatccgaccactaattgccaagcaccgcttcgtgtggctccacctggatgttctgtgcctgtaaacatagattcgctttccatgttgttggccggatcaccatctgaagagcagacggatggaaaaaggacctgatcattggggaagctggctttctggctgctggaggctggggagaaggtgttcattcacttgcatttctttgccctgggggctgtgatattaacagagggagggttcctgtggggggaagtccatgcctccctggcctgaagaagagactctttgcatatgactcacatgatgcatacctggtgggaggaaaagagttgggaacttcagatggacctagtacccactgagatttccacgccgaaggacagcgatgggaaaaatgcccttaaatcataggaaagtatttttttaagctaccaattgtgccgagaaaagcattttagcaatttatacaatatcatccagtaccttaagccctgattgtgtatattcatatattttggatacgcaccccccaactcccaatactggctctgtctgagtaagaaacagaatcctctggaacttgaggaagtgaacatttcggtgacttccgcatcaggaaggctagagttacccagagcatcaggccgccacaagtgcctgcttttaggagaccgaagtccgcagaacctgcctgtgtcccagcttggaggcctggtcctggaactgagccggggccctcactggcctcctccagggatgatcaacagggcagtgtggtctccgaatgtctggaagctgatggagctcagaattccactgtcaagaaagagcagtagaggggtgtggctgggcctgtcaccctggggccctccaggtaggcccgttttcacgtggagcatgggagccacgacccttcttaagacatgtatcactgtagagggaaggaacagaggccctgggcccttcctatcagaaggacatggtgaaggctgggaacgtgaggagaggcaatggccacggcccattttggctgtagcacatggcacgttggctgtgtggccttggcccacctgtgagtttaaagcaaggctttaaatgactttggagagggtcacaaatcctaaaagaagcattgaagtgaggtgtcatggattaattgacccctgtctatggaattacatgtaaaacattatcttgtcactgtagtttggttttatttgaaaacctgacaaaaaaaaagttccaggtgtggaatatgggggttatctgtacatcctggggcattaaaaaaaaaatcaatggtggggaactataaagaagtaacaaaagaagtgacatcttcagcaaataaactaggaaatttttttttcttccagtttagaatcagccttgaaacattgatggaataactctgtggcattattgcattatataccatttatctgtattaactttggaatgtactctgttcaatgtttaatgctgtggttgatatttcgaaagctgctttaaaaaaatacatgcatctcagcgtttttttgtttttaattgtatttagttatggcctatacactatttgtgagcaaaggtgatcgttttctgtttgagatttttatctcttgattcttcaaaagcattctgagaaggtgagataagccctgagtctcagctacctaagaaaaacctggatgtcactggccactgaggagctttgtttcaaccaagtcatgtgcatttccacgtcaacagaattgtttattgtgacagttatatctgttgtccctttgaccttgtttcttgaaggtttcctcgtccctgggcaattccgcatttaattcatggtattcaggattacatgcatgtttggttaaacccatgagattcattcagttaaaaatccagatggcaaatgaccagcagattcaaatctatggtggtttgacctttagagagttgctttacgtggcctgtttcaacacagacccacccagagccctcctgccctccttccgcgggggctttctcatggctgtccttcagggtcttcctgaaatgcagtggtgcttacgctccaccaagaaagcaggaaacctgtggtatgaagccagacctccccggcgggcctcagggaacagaatgatcagacctttgaatgattctaatttttaagcaaaatattattttatgaaaggtttacattgtcaaagtgatgaatatggaatatccaatcctgtgctgctatcctgccaaaatcattttaatggagtcagtttgcagtatgctccacgtggtaagatcctccaagctgctttagaagtaacaatgaagaacgtggacgcttttaatataaagcctgttttgtcttctgttgttgttcaaacgggattcacagagtatttgaaaaatgtatatatattaagaggtcacgggggctaattgctggctggctgccttttgctgtggggttttgttacctggttttaataacagtaaatgtgcccagcctcttggccccagaactgtacagtattgtggctgcacttgctctaagagtagttgatgttgcattttccttattgttaaaaacatgttagaagcaatgaatgtatataaaagcctcaactagtcatttttttctcctcttcttttttttcattatatctaattattttgcagttgggcaacagagaaccatccctattttgtattgaagagggattcacatctgcatcttaactgctctttatgaatgaaaaaacagtcctctgtatgtactcctctttacactggccagggtcagagttaaatagagtatatgcactttccaaattggggacaagggctctaaaaaaagccccaaaaggagaagaacatctgagaacctcctcggccctcccagtccctcgctgcacaaatactccgcaagagaggccagaatgacagctgacagggtctatggccatcgggtcgtctccgaagatttggcaggggcagaaaactctggcaggcttaagatttggaataaagtcacagaatcaaggaagcacctcaatttagttcaaacaagacgccaacattctctccacagctcacttacctctctgtgttcagatgtggccttccatttatatgtgatctttgttttattagtaaatgcttatcatctaaagatgtagctctggcccagtgggaaaaattaggaagtgattataaatcgagaggagttataataatcaagattaaatgtaaataatcagggcaatcccaacacatgtctagctttcacctccaggatctattgagtgaacagaattgcaaatagtctctatttgtaattgaacttatcctaaaacaaatagtttataaatgtgaacttaaactctaattaattccaactgtacttttaaggcagtggctgtttttagactttcttatcacttatagttagtaatgtacacctactctatcagagaaaaacaggaaaggctcgaaatacaagccattctaaggaaattagggagtcagttgaaattctattctgatcttattctgtggtgtcttttgcagcccagacaaatgtggttacacactttttaagaaatacaattctacattgtcaagcttatgaaggttccaatcagatctttattgttattcaatttggatctttcagggattttttttttaaattattatgggacaaaggacatttgttggaggggtgggagggaggaacaatttttaaatataaaacattcccaagtttggatcagggagttggaagttttcagaataaccagaactaagggtatgaaggacctgtattggggtcgatgtgatgcctctgcgaagaaccttgtgtgacaaatgagaaacattttgaagtttgtggtacgacctttagattccagagacatcagcatggctcaaagtgcagctccgtttggcagtgcaatggtataaatttcaagctggatatgtctaatgggtatttaaacaataaatgtgcagttttaactaacaggatatttaatgacaaccttctggttggtagggacatctgtttctaaatgtttattatgtacaatacagaaaaaaattttataaaattaagcaatgtgaaactgaattggagagtgataatacaagtcctttagtcttacccagtgaatcattctgttccatgtctttggacaaccatgaccttggacaatcatgaaatatgcatctcactggatgcaaagaaaatcagatggagcatgaatggtactgtaccggttcatctggactgccccagaaaaataacttcaagcaaacatcctatcaacaacaaggttgttctgcataccaagctgagcacagaagatgggaacactggtggaggatggaaaggctcgctcaatcaagaaaattctgagactattaataaataagactgtagtgtagatactgagtaaatccatgcacctaaaccttttggaaaatctgccgtgggccctccagatagctcatttcattaagtttttccctccaaggtagaatttgcaagagtgacagtggattgcatttcttttggggaagctttcttttggtggttttgtttattataccttcttaagttttcaaccaaggtttgcttttgttttgagttactggggttatttttgttttaaataaaaataagtgtacaataagtgtttttgtattgaaagcttttgttatcaagattttcatacttttaccttccatggctctttttaagattgatacttttaagaggtggctgatattctgcaacactgtacacataaaaaatacggtaaggatactttacatggttaaggtaaagtaagtctccagttggccaccattagctataatggcactttgtttgtgttgttggaaaaagtcacattgccattaaactttccttgtctgtctagttaatattgtgaagaaaaataaagtacagtgtgagatactg

SEQ ID NO: 118 - DNA, 343 bp, Homo sapiens
  5' terminal sequence. v-erb-b2 avian erythroblastic leukemia viral oncogene homolog 2 (neuro/glioblastoma derived oncogene homolog) (ERBB2) gene.
  modified_base (17): a, t, c or g
  modified_base (18): a, t, c or g
caaggggctgcaaactnncccacacatgaccccagccctctacagcggtacagtgaggaccccacagtacccctgccctctgagactgatggctacgttgcccccctgacctgcagcccccagcctgaatatgtgaaccagccagatgttcggccccagcccccttcgccccgagaggccctctgcctgctgcccgacctgctggtgccactctggaaaggcccaagactctctccccagggaagaatggggtcgtcaaagagtttttgcctttgggggtgccgtgggagaaccccgagtattgacaccccaggggagggagcttgcccttcagccccacctt

SEQ ID NO: 119 - DNA, 4530 bp, Homo sapiens
  v-erb-b2 avian erythroblastic leukemia viral oncogene homolog 2 (neuro/glioblastoma derived oncogene homolog) (ERBB2) gene.
aattctcgagctcgtcgaccggtcgacgagctcgagggtcgacgagctcgagggcgcgcgcccggcccccacccctcgcagcaccccgcgccccgcgccctcccagccgggtccagccggagccatggggccggagccgcagtgagcaccatggagctggcggccttgtgccgctgggggctcctcctcgccctcttgccccccggagccgcgagcacccaagtgtgcaccggcacagacatgaagctgcggctccctgccagtcccgagacccacctggacatgctccgccacctctaccagggctgccaggtggtgcagggaaacctggaactcacctacctgcccaccaatgccagcctgtccttcctgcaggatatccaggaggtgcagggctacgtgctcatcgctcacaaccaagtgaggcaggtcccactgcagaggctgcggattgtgcgaggcacccagctctttgaggacaactatgccctggccgtgctagacaatggagacccgctgaacaataccacccctgtcacaggggcctccccaggaggcctgcgggagctgcagcttcgaagcctcacagagatcttgaaaggaggggtcttgatccagcggaacccccagctctgctaccaggacacgattttgtggaaggacatcttccacaagaacaaccagctggctctcacactgatagacaccaaccgctctcgggcctgccacccctgttctccgatgtgtaagggctcccgctgctggggagagagttctgaggattgtcagagcctgacgcgcactgtctgtgccggtggctgtgcccgctgcaaggggccactgcccactgactgctgccatgagcagtgtgctgccggctgcacgggccccaagcactctgactgcctggcctgcctccacttcaaccacagtggcatctgtgagctgcactgcccagccctggtcacctacaacacagacacgtttgagtccatgcccaatcccgagggccggtatacattcggcgccagctgtgtgactgcctgtccctacaactacctttctacggacgtgggatcctgcaccctcgtctgccccctgcacaaccaagaggtgacagcagaggatggaacacagcggtgtgagaagtgcagcaagccctgtgcccgagtgtgctatggtctgggcatggagcacttgcgagaggtgagggcagttaccagtgccaatatccaggagtttgctggctgcaagaagatctttgggagcctggcatttctgccggagagctttgatggggacccagcctccaacactgccccgctccagccagagcagctccaagtgtttgagactctggaagagatcacaggttacctatacatctcagcatggccggacagcctgcctgacctcagcgtcttccagaacctgcaagtaatccggggacgaattctgcacaatggcgcctactcgctgaccctgcaagggctgggcatcagctggctggggctgcgctcactgagggaactgggcagtggactggccctcatccaccataacacccacctctgcttcgtgcacacggtgccctgggaccagctctttcggaacccgcaccaagctctgctccacactgccaaccggccagaggacgagtgtgtgggcgagggcctggcctgccaccagctgtgcgcccgagggcactgctggggtccagggcccacccagtgtgtcaactgcagccagttccttcggggccaggagtgcgtggaggaatgccgagtactgcaggggctccccagggagtatgtgaatgccaggcactgtttgccgtgccaccctgagtgtcagccccagaatggctcagtgacctgttttggaccggaggctgaccagtgtgtggcctgtgcccactataaggaccctcccttctgcgtggcccgctgccccagcggtgtgaaacctgacctctcctacatgcccatctggaagtttccagatgaggagggcgcatgccagccttgccccatcaactgcacccactcctgtgtggacctggatgacaagggctgccccgccgagcagagagccagccctctgacgtccatcgtctctgcggtggttggcattctgctggtcgtggtcttgggggtggtctttgggatcctcatcaagcgacggcagcagaagatccggaagtacacgatgcggagactgctgcaggaaacggagctggtggagccgctgacacctagcggagcgatgcccaaccaggcgcagatgcggatcctgaaagagacggagctgaggaaggtgaaggtgcttggatctggcgcttttggcacagtctacaagggcatctggatccctgatggggagaatgtgaaaattccagtggccatcaaagtgttgagggaaaacacatcccccaaagccaacaaagaaatcttagacgaagcatacgtgatggctggtgtgggctccccatatgtctcccgccttctgggcatctgcctgacatccacggtgcagctggtgacacagcttatgccctatggctgcctcttagaccatgtccgggaaaaccgcggacgcctgggctcccaggacctgctgaactggtgtatgcagattgccaaggggatgagctacctggaggatgtgcggctcgtacacagggacttggccgctcggaacgtgctggtcaagagtcccaaccatgtcaaaattacagacttcgggctggctcggctgctggacattgacgagacagagtaccatgcagatgggggcaaggtgcccatcaagtggatggcgctggagtccattctccgccggcggttcacccaccagagtgatgtgtggagttatggtgtgactgtgtgggagctgatgacttttggggccaaaccttacgatgggatcccagcccgggagatccctgacctgctggaaaagggggagcggctgccccagccccccatctgcaccattgatgtctacatgatcatggtcaaatgttggatgattgactctgaatgtcggccaagattccgggagttggtgtctgaattctcccgcatggccagggacccccagcgctttgtggtcatccagaatgaggacttgggcccagccagtcccttggacagcaccttctaccgctcactgctggaggacgatgacatgggggacctggtggatgctgaggagtatctggtaccccagcagggcttcttctgtccagaccctgccccgggcgctgggggcatggtccaccacaggcaccgcagctcatctaccaggagtggcggtggggacctgacactagggctggagccctctgaagaggaggcccccaggtctccactggcaccctccgaaggggctggctccgatgtatttgatggtgacctgggaatgggggcagccaaggggctgcaaagcctccccacacatgaccccagccctctacagcggtacagtgaggaccccacagtacccctgccctctgagactgatggctacgttgcccccctgacctgcagcccccagcctgaatatgtgaaccagccagatgttcggccccagcccccttcgccccgagagggccctctgcctgctgcccgacctgctggtgccactctggaaagggccaagactctctccccagggaagaatggggtcgtcaaagacgtttttgcctttgggggtgccgtggagaaccccgagtacttgacaccccagggaggagctgcccctcagccccaccctcctcctgccttcagcccagccttcgacaacctctattactgggaccaggacccaccagagcggggggctccacccagcaccttcaaagggacacctacggcagagaacccagagtacctgggtctggacgtgccagtgtgaaccagaaggccaagtccgcagaagccctgatgtgtcctcagggagcagggaaggcctgacttctgctggcatcaagaggtgggagggccctccgaccacttccaggggaacctgccatgccaggaacctgtcctaaggaaccttccttcctgcttgagttcccagatggctggaaggggtccagcctcgttggaagaggaacagcactggggagtctttgtggattctgaggccctgcccaatgagactctagggtccagtggatgccacagcccagcttggccctttccttccagatcctgggtactgaaagccttagggaagctggcctgagaggggaagcggccctaagggagtgtctaagaacaaaagcgacccattcagagactgtccctgaaacctagtactgccccccatgaggaaggaacagcaatggtgtcagtatccaggctttgtacagagtgcttttctgtttagtttttactttttttgttttgtttttttaaagacgaaataaagacccaggggagaatgggtgttgtatggggaggcaagtgtggggggtccttctccacacccactttgtccatttgcaaatatattttggaaaac

SEQ ID NO: 120 - DNA, 319 bp, Homo sapiens
  5' terminal sequence. mouse double minute 2, human homolog of; p53-binding protein (MDM2) gene.
  modified_base (1): a, t, c or g
  modified_base (278): a, t, c or g
nacttatttcccctagttgacctgtctataagagaattatatatttctaactatataaccctaggaatttagacaacctgaaatttattcacatatatcaaagtgagaaaatgcctcaattcacatagatttcttctctttagtataattgacctactttggtagtgggaatagtgaatacttactataatttgacttgaatatgtaggctcatcctttacaccaactcctaattttaaataatttctactctgtcttaaatgaggaggtacttgggnttttttttttcttaaatatggtatatggacatttaaatggt

SEQ ID NO: 121 - DNA, 2372 bp, Homo sapiens
  mouse double minute 2, human homolog of; p53-binding protein (MDM2) gene.
gcaccgcgcgagcttggctgcttctggggcctgtgtggccctgtgtgtcggaaagatggagcaagaagccgagcccgaggggcggccgcgacccctctgaccgagatcctgctgctttcgcagccaggagcaccgtccctccccggattagtgcgtacgagcgcccagtgccctggcccggagagtggaatgatccccgaggcccagggcgtcgtgcttccgcagtagtcagtccccgtgaaggaaactggggagtcttgagggacccccgactccaagcgcgaaaaccccggatggtgaggagcaggcaaatgtgcaataccaacatgtctgtacctactgatggtgctgtaaccacctcacagattccagcttcggaacaagagaccctggttagaccaaagccattgcttttgaagttattaaagtctgttggtgcacaaaaagacacttatactatgaaagaggttcttttttatcttggccagtatattatgactaaacgattatatgatgagaagcaacaacatattgtatattgttcaaatgatcttctaggagatttgtttggcgtgccaagcttctctgtgaaagagcacaggaaaatatataccatgatctacaggaacttggtagtagtcaatcagcaggaatcatcggactcaggtacatctgtgagtgagaacaggtgtcaccttgaaggtgggagtgatcaaaaggaccttgtacaagagcttcaggaagagaaaccttcatcttcacatttggtttctagaccatctacctcatctagaaggagagcaattagtgagacagaagaaaattcagatgaattatctggtgaacgacaaagaaaacgccacaaatctgatagtatttccctttcctttgatgaaagcctggctctgtgtgtaataagggagatatgttgtgaaagaagcagtagcagtgaatctacagggacgccatcgaatccggatcttgatgctggtgtaagtgaacattcaggtgattggttggatcaggattcagtttcagatcagtttagtgtagaatttgaagttgaatctctcgactcagaagattatagccttagtgaagaaggacaagaactctcagatgaagatgatgaggtatatcaagttactgtgtatcaggcaggggagagtgatacagattcatttgaagaagatcctgaaatttccttagctgactattggaaatgcacttcatgcaatgaaatgaatcccccccttccatcacattgcaacagatgttgggcccttcgtgagaattggcttcctgaagataaagggaaagataaaggggaaatctctgagaaagccaaactggaaaactcaacacaagctgaagagggctttgatgttcctgattgtaaaaaaactatagtgaatgattccagagagtcatgtgttgaggaaaatgatgataaaattacacaagcttcacaatcacaagaaagtgaagactattctcagccatcaacttctagtagcattatttatagcagccaagaagatgtgaaagagtttgaaagggaagaaacccaagacaaagaagagagtgtggaatctagtttgccccttaatgccattgaaccttgtgtgatttgtcaaggtcgacctaaaaatggttgcattgtccatggcaaaacaggacatcttatggcctgctttacatgtgcaaagaagctaaagaaaaggaataagccctgcccagtatgtagacaaccaattcaaatgattgtgctaacttatttcccctagttgacctgtctataagagaattatatatttctaactatataaccctaggaatttagacaacctgaaatttattcacatatatcaaagtgagaaaatgcctcaattcacatagatttcttctctttagtataattgacctactttggtagtggaatagtgaatacttactataatttgacttgaatatgtagctcatcctttacaccaactcctaattttaaataatttctactctgtcttaaatgagaagtacttggttttttttttcttaaatatgtatatgacatttaaatgtaacttattattttttttgagaccgagtcttgctctgttacccaggctggagtgcagtgggtgatcttggctcactgcaagctctgccctccccgggttcgcaccattctcctgcctcagcctcccaattagcttggcctacagtcatctgccaccacacctggctaattttttgtacttttagtagagacagggtttcaccgtgttagccaggatggtctcgatctcctgacctcgtgatccgcccacctcggcctcccaaagtgctgggattacaggcatgagccaccg

SEQ ID NO: 122 - DNA, 343 bp, Homo sapiens
  3' terminal sequence. gata-binding protein 3 (GATA3) gene.
  modified_base (57): a, t, c or g
  modified_base (71): a, t, c or g
  modified_base (81): a, t, c or g
  modified_base (91): a, t, c or g
  modified_base (104): a, t, c or g
  modified_base (105): a, t, c or g
  modified_base (110): a, t, c or g
  modified_base (234): a, t, c or g
  modified_base (331): a, t, c or g
atgcttataatattattccaacagactgtattaaaggcagtgatcactaacacagancacgacagggcgangaggcagccnggccgataancaggacgtggccnntcggncagggttcgctgacatgcacgctggtagctcatacactgctaccctcagcacaggctgcaggaatagggacaagacagatgccgccggactcttaggaagctatttaataaatatcatccaaanacaaaatgggaaaaggaaacaaggaaaccctccggggcacaaccaccttaggggccaactggaatggtaattctaggttttatttccaacccaaaanttgaggagagga

SEQ ID NO: 123 - DNA, 258 bp, Homo sapiens
  3' terminal sequence. src homology 3 domain-containing protein hip-55 (HIP-55) gene.
  modified_base (9): a, t, c or g
  modified_base (120): a, t, c or g
  modified_base (192): a, t, c or g
  modified_base (243): a, t, c or g
cgagtgagntatgttggaggaacatgttgtgtctgccgtttttgaatacccagggtgggagcttggccatctgcatccccacttcccatagcccaggcagagggacagagaaatggagtngggagcacagagcaggctccaacaagacaaattccctgctgccaaaccaccatgatccactctgactttggncacaaactctgctaaaaacaattctctacgttcactgttcccaaggggcanttttaaacagtggtg

SEQ ID NO: 124 - DNA, 443 bp, Homo sapiens
  5' terminal sequence. src homology 3 domain-containing protein hip-55 (HIP-55) gene.
  modified_base (34): a, t, c or g
  modified_base (36): a, t, c or g
  modified_base (152): a, t, c or g
  modified_base (157): a, t, c or g
  modified_base (321): a, t, c or g
  modified_base (338): a, t, c or g
  modified_base (382): a, t, c or g
  modified_base (403): a, t, c or g
gccagggctcagtgggcaagggctctgtgccgtngncctgtacgactaccatgcagccgacgacacagagatctcctttgaccccgagaacctcatcacgggcatcgaggtgatcgacgaaggctggtggcgtggctatgggccggatcatntgttngcatgttccctgccaactacgtggagctcattgagtgaggctgagggcacatcttgcccttcccctctcagacatggcttccttattgctggaagaggaggcctggggagttgacattcagcactcttccagggaatagggacccccagttgaggattgaggcntcagggttccctccggnttgggcagattcagccttttcaccccaaatggcagcaattggcntgggtgatttcccacaaatcnttcctggcattcccccgacctttcccagacagtttggttt

SEQ ID NO: 125 - DNA, 1331 bp, Homo sapiens
  src homology 3 domain-containing protein hip-55 (HIP-55) gene.
atggcggcgaacctgagccggaacgggccagcgctgcaagaggcctacgtgcgggtggtcaccgagaagtccccgaccgactgggctctctttacctatgaaggcaacagcaatgacatccgcgtggctggcacaggggagggtggcctggaggagatggtggaggagctcaacagcgggaaggtgatgtacgccttctgcagagtgaaggaccccaactctggactgcccaaatttgtcctcatcaactggacaggcgagggcgtgaacgatgtgcggaagggagcctgtgccagccacgtcagcaccatggccagcttcctgaagggggcccatgtgaccatcaacgcacgggccgaggaggatgtggagcctgagtgcatcatggagaaggtggccaaggcttcaggtgccaactacagctttcacaaggagagtggccgcttccaggacgtgggaccccaggccccagtgggctctgtgtaccagaagaccaatgccgtgtctgagattaaaagggttggtaaagacagcttctgggccaaagcagagaaggaggaggagaaccgtcggctggaggaaaagcggcgggccgaggaggcacagcggcagctggagcaggagcgccgggagcgtgagctgcgtgaggctgcacgccgggagcagcgctatcaggagcagggtggcgaggccagcccccagaggacgtgggagcagcagcaagaagtggtttcaaggaaccgaaatgagcaggagtctgccgtgcacccgagggagattttcaagcagaaggagagggccatgtccaccacctccatctccagtcctcagcctggcaagctgaggagccccttcctgcagaagcagctcacccaaccagagacccactttggcagagagccagctgctgccatctcaaggcccagggcagatctccctgctgaggagccggcgcccagcactcctccatgtctggtgcaggcagaagaggaggctgtgtatgaggaacctccagagcaggagaccttctacgagcagcccccactggtgcagcagcaaggtgccggctctgagcacattgaccaccacattcagggccaggggctcagtgggcaagggctctgtgcccgtgccctgtacgactaccaggcagccgacgacacagagatctcctttgaccccgagaacctcatcacgggcatcgaggtgatcgacgaaggctggtggcgtggctatgggccggatggccattttggcatgttccctgccaactacgtggagctcattgagtgaggctgagggcggccgctagactagtctagagaaaaaac

SEQ ID NO: 126 - DNA, 430 bp, Homo sapiens
  3' terminal sequence. cathepsin d (lysosomal aspartyl protease) (CTSD) gene.
  modified_base (273): a, t, c or g
  modified_base (282): a, t, c or g
  modified_base (315): a, t, c or g
  modified_base (326): a, t, c or g
  modified_base (347): a, t, c or g
  modified_base (365): a, t, c or g
  modified_base (372): a, t, c or g
  modified_base (393): a, t, c or g
  modified_base (404): a, t, c or g
  modified_base (409): a, t, c or g
  modified_base (423): a, t, c or g
gtatttccatgtcagctggggctctcagccgcccaaggggaggacaacagaggtcagctgcagaggaaggctggcaccagccccaatcccaaccccacctccaggccaatacatgcccctgggactggctcagtcccagcaccaccctgcaggctccaacaaggtgggttttgtcccctctcactccttccagctcatcctcaggcctctagcggcctcatcctcaacgggcccgggacactgaacaggtagggtgggcagagccagctgggncccaagctnggcaagaggggccctcaggcagggcaggttttncaagggagggncccggaggacggccttgggtnttggggtaagggcttaanccagtcngggctttggtaagggcccggnaagggattccntgggnaaattaaagggaanccccagg

SEQ ID NO: 127 - DNA, 339 bp, Homo sapiens
  5' terminal sequence. cathepsin d (lysosomal aspartyl protease) (CTSD) gene.
  modified_base (40): a, t, c or g
  modified_base (227): a, t, c or g
  modified_base (267): a, t, c or g
gtggatgaggtgcgcgactgcagaaggccatcggggcgtngccgctgattcagggcgagtacatgatcccctgtgagaaggtgtccaccctgcccgcgatcacactgaagctgggaggcaaaggctacaagctgtccccagaggactacacgctcaaggtgtcgcaggccgggaagaccctctgcctgagcggcttcatgggcatggacatcccgccacccagcggncactctggatcctggggcgacgtcttcattcggccgttantacattgtgttttgaccgtgacaacaacagggttgggtttcgcgaggcttgcccgcttttagtttcccaagg

SEQ ID NO: 128 - DNA, 1988 bp, Homo sapiens
  cathepsin d (lysosomal aspartyl protease) (CTSD) gene.
ccatgcagccctccagccttctgccgctcgccctctgcctgctggctgcacccgcctccgcgctcgtcaggatcccgctgcacaagttcacgtccatccgccggaccatgtcggaggttgggggctctgtggaggacctgattgccaaaggccccgtctcaaagtactcccaggcggtgccagccgtgaccgaggggcccattcccgaggtgctcaagaactacatggacgcccagtactacggggagattggcatcgggacgcccccccagtgcttcacagtcgtcttcgacacgggctcctccaacctgtgggtcccctccatccactgcaaactgctggacatcgcttgctggatccaccacaagtacaacagcgacaagtccagcacctacgttaagaatggtacctcgtttgacatccactatggctcgggcagcctctccgggtacctgagccaggacactgtgtcggtgccctgccagtcagcgtcgtcagcctctgccctgggcggtgtcaaagtggagaggcaggtctttggggaggccaccaagcagccaggcatcaccttcatcgcagccaagttcgatggcatcctgggcatggcctacccccgcatctccgtcaacaacgtgctgcccgtcttcgacaacctgatgcagcagaagctggtggaccagaacatcttctccttctacctgagcagggacccagatgcgcagcctgggggtgagctgatgctgggtggcacagactccaagtattacaagggttctctgtcctacctgaatgtcacccgcaaggcctactggcaggtccacctggaccaggtggaggtggccagcgggctgaccctgtgcaaggagggctgtgaggccattgtggacacaggcacttccctcatggtgggcccggtggatgaggtgcgcgagctgcagaaggccatcggggccgtgccgctgattcagggcgagtacatgatcccctgtgagaaggtgtccaccctgcccgcgatcacactgaagctgggaggcaaaggctacaagctgtccccagaggactacacgctcaaggtgtcgcaggccgggaagaccctctgcctgagcggcttcatgggcatggacatcccgccacccagcgggccactctggatcctgggcgacgtcttcatcggccgctactacactgtgtttgaccgtgacaacaacagggtgggcttcgccgaggctgcccgcctctagttcccaaggcgtccgcgcgccagcacagaaacagaggagagtcccagagcaggaggcccctggcccagcggcccctcccacacacacccacacactcgcccgcccactgtcctgggcgccctggaagccggcggcccaagcccgacttgctgttttgttctgtggttttcccctccctgggttcagaaatgctgcctgcctgtctgtctctccatctgtttggtgggggtagagctgatccagagcacagatctgtttcgtgcattggaagaccccacccaagcttggcagccgagctcgtgtatcctggggctcccttcatctccagggagtcccctccccggccctaccagcgcccgctggctgagcccctaccccacaccaggccgtcctcccgggccctcccttggaaacctgccctgcctgagggcccctctgcccagcttgggcccagctgggctctgccaccctacctgttcagtgtcccgggcccgttgaggatgaggccgctagaggcctgaggatgagctggaaggagtgagaggggacaaaacccaccttgttggagcctgcagggtggtgctgggactgagccagtcccaggggcatgtattggcctggaggtggggttgggattgggggctggtgccagccttcctctgcagctgacctctgttgtcctccccttgggcggctgagagccccagctgacatggaaatacagttgttggcctccggcctcccctc

SEQ ID NO: 129 - DNA, 385 bp, Homo sapiens
  5' terminal sequence. insulin-like growth factor 1 receptor (IGF1R) gene.
  modified_base (239): a, t, c or g
  modified_base (359): a, t, c or g
  modified_base (367): a, t, c or g
  modified_base (378): a, t, c or g
gtggcggcactcattgttctcggtgcacgcccgcttcccacacgtgcttgtggcacattttctggcagcggtttgtggtccagcagcggtagttgtactcattgttgatggtggtcttctcacacatcggcttctcctccatggtccctggacacaggtccccacattcctttgggggcttattccccacaatgtagttattggacaccgcatccaggatcagggaccagtccacagtngagaggtaacagaggtcagcatttttctcaatcctgatggccccccgagtaatgttcctcaggttgtaaagcccaatatccttgaggatgggtcaatcttcgaaggatgaaccaggggcntaggtttnttggaaggagnttttcca

SEQ ID NO: 130 - DNA, 4989 bp, Homo sapiens
  insulin-like growth factor 1 receptor (IGF1R) gene.
ttttttttttttttgagaaagggaatttcatcccaaataaaaggaatgaagtctggctccggaggagggtccccgacctcgctgtgggggctcctgtttctctccgccgcgctctcgctctggccgacgagtggagaaatctgcgggccaggcatcgacatccgcaacgactatcagcagctgaagcgcctggagaactgcacggtgatcgagggctacctccacatcctgctcatctccaaggccgaggactaccgcagctaccgcttccccaagctcacggtcattaccgagtacttgctgctgttccgagtggctggcctcgagagcctcggagacctcttccccaacctcacggtcatccgcggctggaaactcttctacaactacgccctggtcatcttcgagatgaccaatctcaaggatattgggctttacaacctgaggaacattactcggggggccatcaggattgagaaaaatgctgacctctgttacctctccactgtggactggtccctgatcctggatgcggtgtccaataactacattgtggggaataagcccccaaaggaatgtggggacctgtgtccagggaccatggaggagaagccgatgtgtgagaagaccaccatcaacaatgagtacaactaccgctgctggaccacaaaccgctgccagaaaatgtgcccaagcacgtgtgggaagcgggcgtgcaccgagaacaatgagtgctgccaccccgagtgcctgggcagctgcagcgcgcctgacaacgacacggcctgtgtagcttgccgccactactactatgccggtgtctgtgtgcctgcctgcccgcccaacacctacaggtttgagggctggcgctgtgtggaccgtgacttctgcgccaacatcctcagcgccgagagcagcgactccgaggggtttgtgatccacgacggcgagtgcatgcaggagtgcccctcgggcttcatccgcaacggcagccagagcatgtactgcatcccttgtgaaggtccttgcccgaaggtctgtgaggaagaaaagaaaacaaagaccattgattctgttacttctgctcagatgctccaaggatgcaccatcttcaagggcaatttgctcattaacatccgacgggggaataacattgcttcagagctggagaacttcatggggctcatcgaggtggtgacgggctacgtgaagatccgccattctcatgccttggtctccttgtccttcctaaaaaaccttcgcctcatcctaggagaggagcagctagaagggaattactccttctacgtcctcgacaaccagaacttgcagcaactgtgggactgggaccaccgcaacctgaccatcaaagcagggaaaatgtactttgctttcaatcccaaattatgtgtttccgaaatttaccgcatggaggaagtgacggggactaaagggcgccaaagcaaaggggacataaacaccaggaacaacggggagagagcctcctgtgaaagtgacgtcctgcatttcacctccaccaccacgtcgaagaatcgcatcatcataacctggcaccggtaccggccccctgactacagggatctcatcagcttcaccgtttactacaaggaagcaccctttaagaatgtcacagagtatgatgggcaggatgcctgcggctccaacagctggaacatggtggacgtggacctcccgcccaacaaggacgtggagcccggcatcttactacatgggctgaagccctggactcagtacgccgtttacgtcaaggctgtgaccctcaccatggtggagaacgaccatatccgtggggccaagagtgagatcttgtacattcgcaccaatgcttcagttccttccattcccttggacgttctttcagcatcgaactcctcttctcagttaatcgtgaagtggaaccctccctctctgcccaacggcaacctgagttactacattgtgcgctggcagcggcagcctcaggacggctacctttaccggcacaattactgctccaaagacaaaatccccatcaggaagtatgccgacggcaccatcgacattgaggaggtcacagagaaccccaagactgaggtgtgtggtggggagaaagggccttgctgcgcctgccccaaaactgaagccgagaagcaggccgagaaggaggaggctgaataccgcaaagtctttgagaatttcctgcacaactccatcttcgtgcccagacctgaaaggaagcggagagatgtcatgcaagtggccaacaccaccatgtccagccgaagcaggaacaccacggccgcagacacctacaacatcaccgacccggaagagctggagacagagtaccctttctttgagagcagagtggataacaaggagagaactgtcatttctaaccttcggcctttcacattgtaccgcatcgatatccacagctgcaaccacgaggctgagaagctgggctgcagcgcctccaacttcgtctttgcaaggactatgcccgcagaaggagcagatgacattcctgggccagtgacctgggagccaaggcctgaaaactccatctttttaaagtggccggaacctgagaatcccaatggattgattctaatgtatgaaataaaatacggatcacaagttgaggatcagcgagaatgtgtgtccagacaggaatacaggaagtatggaggggccaagctaaaccggctaaacccggggaactacacagcccggattcaggccacatctctctctgggaatgggtcgtggacagatcctgtgttcttctatgtccaggccaaaacaggatatgaaaacttcatccatctgatcatcgctctgcccgtcgctgtcctgttgatcgtgggagggttggtgattatgctgtacgtcttccatagaaagagaaataacagcaggctggggaatggagtgctgtatgcctctgtgaacccggagtacttcagcgctgctgatgtgtacgttcctgatgagtgggaggtggctcgggagaagatcaccatgagccgggaacttgggcaggggtcgtttgggatggtctatgaaggagttgccaagggtgtggtgaaagatgaacctgaaaccagagtggccattaaaacagtgaacgaggccgcaagcatgcgtgagaggattgagtttctcaacgaagcttctgtgatgaaggagttcaattgtcaccatgtggtgcgattgctgggtgtggtgtcccaaggccagccaacactggtcatcatggaactgatgacacggggcgatctcaaaagttatctccggtctctgaggccagaaatggagaataatccagtcctagcacctccaagcctgagcaagatgattcagatggccggagagattgcagacggcatggcatacctcaacgccaataagttcgtccacagagaccttgctgcccggaattgcatggtagccgaagatttcacagtcaaaatcggagattttggtatgacgcgagatatctatgagacagactattaccggaaaggaggcaaagggctgctgcccgtgcgctggatgtctcctgagtccctcaaggatggagtcttcaccacttactcggacgtctggtccttcggggtcgtcctctgggagatcgccacactggccgagcagccctaccagggcttgtccaacgagcaagtccttcgcttcgtcatggagggcggccttctggacaagccagacaactgtcctgacatgctgtttgaactgatgcgcatgtgctggcagtataaccccaagatgaggccttccttcctggagatcatcagcagcatcaaagaggagatggagcctggcttccgggaggtctccttctactacagcgaggagaacaagctgcccgagccggaggagctggacctggagccagagaacatggagagcgtccccctggacccctcggcctcctcgtcctccctgccactgcccgacagacactcaggacacaaggccgagaacggccccggccctggggtgctggtcctccgcgccagcttcgacgagagacagccttacgcccacatgaacgggggccgcaagaacgagcgggccttgccgctgccccagtcttcgacctgctgatccttggatcctgaatctgtgcaaacagtaacgtgtgcgcacgcgcagcggggtggggggggagagagagttttaacaatccattcacaagcctcctgtacctcagtggatcttcagttctgcccttgctgcccgcgggagacagcttctctgcagtaaaacacatttgggatgttccttttttcaatatgcaagcagctttttattccctgcccaaacccttaactgacatgggcctttaagaaccttaatgacaacacttaatagcaacagagcacttgagaaccagtctcctcactctgtccctgtccttccctgttctccctttctctctcctctctgcttcataacggaaaaataattgccacaagtccagctgggaagccctttttatcagtttgaggaagtggctgtccctgtggccccatccaaccactgtacacacccgcctgacaccgtgggtcattacaaaaaaacacgtggagatggaaatttttacctttatctttcacctttctagggacatgaaatttacaaagggccatcgttcatccaaggctgttaccattttaacgctgcctaattttgccaaaatcctgaactttctccctcatcggcccggcgctgattcctcgtgtccggaggcatgggtgagcatggcagctggttgctccatttgagagacacgctggcgacacactccgtccatccgactgcccctgctgtgctgctcaaggccacaggcacacaggtctcattgcttctgactagattattatttgggggaactggacacaataggtctttctctcagtgaaggtggggagaagctgaaccggc

SEQ ID NO: 131 - DNA, 470 bp, Homo sapiens
  5' terminal sequence. insulin receptor (INSR) gene.
  modified_base (149): a, t, c or g
  modified_base (317): a, t, c or g
  modified_base (341): a, t, c or g
  modified_base (402): a, t, c or g
  modified_base (418): a, t, c or g
  modified_base (424): a, t, c or g
  modified_base (464): a, t, c or g
gggcaacaatctggcagctgagctagaagccaacctcggcctcattgaagaaatttcagggtatctaaaaatccgccgatcctacgctctggtgtcactttccttcttccggaagttacgtctgattcgaggagagaccttggaaattnggaactactccttctatgccttggacaaccagaacctaaggcagctctgggactggagcaaacacaacctcaccatcactcaggggaaactcttcttccactataaccccaaactctgcttgtcagaaatccacaagatgggaaggaagtttcagggaaccaaggggncgccaggaggagaaacgacatttnccctggaaggaccaatggggggaccagggcatcctgtggaaaaatggagtttactttaaanttttgctttaacattngggacntttttttggacaagttttttgttgaagttggggagccctnattttg

SEQ ID NO: 132 - DNA, 4691 bp, Homo sapiens
  insulin receptor (INSR) gene.
gagaaggacgcgcggcccccagcgctcttgggggccgcctcggagcatgacccccgcgggccagcgccgcgcgcctgatccgaggagaccccgcgctcccgcagccatgggcaccgggggccggcggggggcggcggccgcgccgctgctggtggcggtggccgcgctgctactgggcgccgcgggccacctgtaccccggagaggtgtgtcccggcatggatatccggaacaacctcactaggttgcatgagctggagaattgctctgtcatcgaaggacacttgcagatactcttgatgttcaaaacgaggcccgaagatttccgagacctcagtttccccaaactcatcatgatcactgattacttgctgctcttccgggtctatgggctcgagagcctgaaggacctgttccccaacctcacggtcatccggggatcacgactgttctttaactacgcgctggtcatcttcgagatggttcacctcaaggaactcggcctctacaacctgatgaacatcacccggggttctgtccgcatcgagaagaacaatgagctctgttacttggccactatcgactggtcccgtatcctggattccgtggaggataatcacatcgtgttgaacaaagatgacaacgaggagtgtggagacatctgtccgggtaccgcgaagggcaagaccaactgccccgccaccgtcatcaacgggcagtttgtcgaacgatgttggactcatagtcactgccagaaagtttgcccgaccatctgtaagtcacacggctgcaccgccgaaggcctctgttgccacagcgagtgcctgggcaactgttctcagcccgacgaccccaccaagtgcgtggcctgccgcaacttctacctggacggcaggtgtgtggagacctgcccgcccccgtactaccacttccaggactggcgctgtgtgaacttcagcttctgccaggacctgcaccacaaatgcaagaactcgcggaggcagggctgccaccaatacgtcattcacaacaacaagtgcatccctgagtgtccctccgggtacacgatgaattccagcaacttgctgtgcaccccatgcctgggtccctgtcccaaggtgtgccacctcctagaaggcgagaagaccatcgactcggtgacgtctgcccaggagctccgaggatgcaccgtcatcaacgggagtctgatcatcaacattcgaggaggcaacaatctggcagctgagctagaagccaacctcggcctcattgaagaaatttcagggtatctaaaaatccgccgatcctacgctctggtgtcactttccttcttccggaagttacgtctgattcgaggagagaccttggaaattgggaactactccttctatgccttggacaaccagaacctaaggcagctctgggactggagcaaacacaacctcaccaccactcaggggaaactcttcttccactataaccccaaactctgcttgtcagaaatccacaagatggaagaagtttcaggaaccaaggggcgccaggagagaaacgacattgccctgaagaccaatggggacaaggcatcctgtgaaaatgagttacttaaattttcttacattcggacatcttttgacaagatcttgctgagatgggagccgtactggccccccgacttccgagacctcttggggttcatgctgttctacaaagaggccccttatcagaatgtgacggagttcgatgggcaggatgcgtgtggttccaacagttggacggtggtagacattgacccacccctgaggtccaacgaccccaaatcacagaaccacccagggtggctgatgcggggtctcaagccctggacccagtatgccatctttgtgaagaccctggtcaccttttcggatgaacgccggacctatggggccaagagtgacatcatttatgtccagacagatgccaccaacccctctgtgcccctggatccaatctcagtgtctaactcatcatcccagattattctgaagtggaaaccaccctccgaccccaatggcaacatcacccactacctggttttctgggagaggcaggcggaagacagtgagctgttcgagctggattattgcctcaaagggctgaagctgccctcgaggacctggtctccaccattcgagtctgaagattctcagaagcacaaccagagtgagtatgaggattcggccggcgaatgctgctcctgtccaaagacagactctcagatcctgaaggagctggaggagtcctcgtttaggaagacgtttgaggattacctgcacaacgtggttttcgtccccagaaaaacctcttcaggcactggtgccgaggaccctaggccatctcggaaacgcaggtcccttggcgatgttgggaatgtgacggtggccgtgcccacggtggcagctttccccaacacttcctcgaccagcgtgcccacgagtccggaggagcacaggccttttgagaaggtggtgaacaaggagtcgctggtcatctccggcttgcgacacttcacgggctatcgcatcgagctgcaggcttgcaaccaggacacccctgaggaacggtgcagtgtggcagcctacgtcagtgcgaggaccatgcctgaagccaaggctgatgacattgttggccctgtgacgcatgaaatctttgagaacaacgtcgtccacttgatgtggcaggagccgaaggagcccaatggtctgatcgtgctgtatgaagtgagttatcggcgatatggtgatgaggagctgcatctctgcgtctcccgcaagcacttcgctctggaacggggctgcaggctgcgtgggctgtcaccggggaactacagcgtgcgaatccgggccacctcccttgcgggcaacggctcttggacggaacccacctatttctacgtgacagactatttagacgtcccgtcaaatattgcaaaaattatcatcggccccctcatctttgtctttctcttcagtgttgtgattggaagtatttatctattcctgagaaagaggcagccagatgggccgctgggaccgctttacgcttcttcaaaccctgagtatctcagtgccagtgatgtgtttccatgctctgtgtacgtgccggacgagtgggaggtgtctcgagagaagatcaccctccttcgagagctggggcagggctccttcggcatggtgtatgagggcaatgccagggacatcatcaagggtgaggcagagacccgcgtggcggtgaagacggtcaacgagtcagccagtctccgagagcggattgagttcctcaatgaggcctcggtcatgaagggcttcacctgccatcacgtggtgcgcctcctgggagtggtgtccaagggccagcccacgctggtggtgatggagctgatggctcacggagacctgaagagctacctccgttctctgcggccagaggctgagaataatcctggccgccctccccctacccttcaagagatgattcagatggcggcagagattgctgacgggatggcctacctgaacgccaagaagtttgtgcatcgggacctggcagcgagaaactgcatggtcgcccatgattttactgtcaaaattggagactttggaatgaccagagacatctatgaaacggattactaccggaaagggggcaagggtctgctccctgtacggtggatggcaccggagtccctgaaggatggggtcttcaccacttcttctgacatgtggtcctttggcgtggtcctttgggaaatcaccagcttggcagaacagccttaccaaggcctgtctaatgaacaggtgttgaaatttgtcatggatggagggtatctggatcaacccgacaactgtccagagagagtcactgacctcatgcgcatgtgctggcaattcaaccccaagatgaggccaaccttcctggagattgtcaacctgctcaaggacgacctgcaccccagctttccagaggtgtcgttcttccacagcgaggagaacaaggctcccgagagtgaggagctggagatggagtttgaggacatggagaatgtgcccctggaccgttcctcgcactgtcagagggaggaggcggggggccgggatggagggtcctcgctgggtttcaagcggagctacgaggaacacatcccttacacacacatgaacggaggcaagaaaaacgggcggattctgaccttgcctcggtccaatccttcctaacagtgcctaccgtggcgggggcgggcaggggttcccattttcgctttcctctggtttgaaagcctctggaaaactcaggattctcacgactctaccatgtccagtggagttcagagatcgttcctatacatttctgttcatcttaaggtggactcgtttggttaccaatttaactagtcctgcagaggatttaactgtgaacctggagggcaaggggtttccacagttgctgctcctttggggcaacgacggtttcaaaccaggattttgtgttttttcgttccccccacccgcccccagcagatggaaagaaagcacctgtttttacaaattcttttttttttttttttttttttttttttgctggtgtctgagcttcagtataaaagacaaaacttcctgtttgtggaacaaaatttcgaaagaaaaaaccaaa

SEQ ID NO: 133 - DNA, 451 bp, Homo sapiens
  5' terminal sequence. forkhead box o1a (rhabdomyosarcoma) (FOXO1A) gene.
  modified_base (1): a, t, c or g
  modified_base (193): a, t, c or g
naaggagttgctgacttctgactctcctccccataatgacattatgacaccagttgatcctggggtagcccagcccaacagccgggttctgggccagaacgtcatgatgggccctaattcggtcatgtcaacctatggcagccaggcatctcataacaaaatgatgaatcccagctcccatacccaccctggnacatgctcagcagacatctgcagttaacgggcgtcccctgccccacacggtaagcaccatgccccacacctcgggtatgaaccgcctgacccaagtgaagacacctgtacaagtgcctcttgccccaccccatggcagatgagtgcctgggggggttaacttccttccgtgaggcagctggcaatgggttatgggcaggatggggcctttttccaccaggagaagcttcccaagttgattttggatgggctttttttt

SEQ ID NO: 134 - DNA, 5723 bp, Homo sapiens
  forkhead box o1a (rhabdomyosarcoma) (FOXO1A) gene.
gcagccgccacattcaacaggcagcagcgcagcgggcgcgccgctggggagagcaagcggcccgcggcgtccgtccgtccttccgtccgcggccctgtcagctggagcgcggcgcaggctctgccccggcccggcggctctggccggccgtccagtccgtgcggcggaccccgaggagcctcgatgtggatggccccgcgaagttaagttctgggctcgcgcttccactccgccgcgccttcctcccagtttccgtccgctcgccgcaccggcttcgttcccccaaatctcggaccgtcccttcgcgccccctccccgtccgcccccagtgctgcgttctccccctcttggctctcctgcggctgggggaggggcgggggtcaccatggccgaggcgcctcaggtggtggagatcgacccggacttcgagccgctgccccggccgcgctcgtgcacctggccgctgcccaggccggagtttagccagtccaactcggccacctccagcccggcgccgtcgggcagcgcggctgccaaccccgacgccgcggcgggcctgccctcggcctcggctgccgctgtcagcgccgacttcatgagcaacctgagcttgctggaggagagcgaggacttcccgcaggcgcccggctccgtggcggcggcggtggcggcggcggccgccgcggccgccaccggggggctgtgcggggacttccagggcccggaggcgggctgcctgcacccagcgccaccgcagcccccgccgcccgggccgctgtcgcagcacccgccggtgccccccgccgccgctgggccgctcgcggggcagccgcgcaagagcagctcgtcccgccgcaacgcgtggggcaacctgtcctacgccgacctcatcaccaaggccatcgagagctcggcggagaagcggctcacgctgtcgcagatctacgagtggatggtcaagagcgtgccctacttcaaggataagggtgacagcaacagctcggcgggctggaagaattcaattcgtcataatctgtccctacacagcaagttcattcgtgtgcagaatgaaggaactggaaaaagttcttggtggatgctcaatccagagggtggcaagagcgggaaatctcctaggagaagagctgcatccatggacaacaacagtaaatttgctaagagccgaagccgagctgccaagaagaaagcatctctccagtctggccaggagggtgctggggacagccctggatcacagttttccaaatggcctgcaagccctggctctcacagcaatgatgactttgataactggagtacatttcgccctcgaactagctcaaatgctagtactattagtgggagactctcacccattatgaccgaacaggatgatcttggagaaggggatgtgcattctatggtgtacccgccatctgccgcaaagatggcctctactttacccagtctgtctgagataagcaatcccgaaaacatggaaaatcttttggataatctcaaccttctctcatcaccaacatcattaactgtttcgacccagtcctcacctggcaccatgatgcagcagacgccgtgctactcgtttgcgccaccaaacaccagtttgaattcacccagcccaaactaccaaaaatatacatatggccaatccagcatgagccctttgccccagatgcctatacaaacacttcaggacaataagtcgagttatggaggtatgagtcagtataactgtgcgcctggactcttgaaggagttgctgacttctgactctcctccccataatgacattatgacaccagttgatcctggggtagcccagcccaacagccgggttctgggccagaacgtcatgatgggccctaattcggtcatgtcaacctatggcagccaggcatctcataacaaaatgatgaatcccagctcccatacccaccctggacatgctcagcagacatctgcagttaacgggcgtcccctgccccacacggtaagcaccatgccccacacctcgggtatgaaccgcctgacccaagtgaagacacctgtacaagtgcctctgccccaccccatgcagatgagtgccctggggggctactcctccgtgagcagctgcaatggctatggcagaatgggccttctccaccaggagaagctcccaagtgacttggatggcatgttcattgagcgcttagactgtgacatggaatccatcattcggaatgacctcatggatggagatacattggattttaactttgacaatgtgttgcccaaccaaagcttcccacacagtgtcaagacaacgacacatagctgggtgtcaggctgagggttagtgagcaggttacacttaaaagtacttcagattgtctgacagcaggaactgagagaagcagtccaaagatgtctttcaccaactcccttttagttttcttggttaaaaaaaaaaacaaaaaaaaaaaccctcctttttttcctttcgtcagacttggcagcaaagacatttttcctgtacaggatgtttgcccaatgtgtgcaggttatgtgctgctgtagataaggactgtgccattggaaatttcattacaatgaagtgccaaactcactacaccatataattgcagaaaagattttcagatcctggtgtgctttcaagttttgtatataagcagtagatacagattgtatttgtgtgtgtttttggtttttctaaatatccaattggtccaaggaaagtttatactctttttgtaatactgtgatgggcctcatgtcttgataagttaaacttttgtttgtactacctgttttctgcggaactgacggatcacaaagaactgaatctccattctgcatctccattgaacagccttggacctgttcacgttgccacagaattcacatgagaaccaagtagcctgttatcaatctgctaaattaatggacttgttaaacttttggaaaaaaaaagattaaatgccagctttgtacaggtcttttctatttttttttgtttattttgttatttgcaaatttgtacaaacatttaaatggttctaatttccagataaatgatttttgatgttattgttgggacttaagaacatttttggaatagatattgaactgtaataatgttttcttaaaactagagtctactttgttacatagtcagcttgtaaattttgtggaaccacaggtatttggggcagcattcataattttcattttgtattctaactggattagtactaattttatacatgcttaactggtttgtacactttgggatgctacttagtgatgtttctgactaatcttaaatcattgtaattagtacttgcatattcaacgtttcaggccctggttgggcaggaaagtgatgtatagttatggacactttgcgtttcttatttaggataacttaatatgtttttatgtatgtattttaaagaaatttcatctgcttctactgaactatgcgtactgcatagcatcaagtcttctctagagacctctgtagtcctgggaggcctcataatgtttgtagatcagaaaagggagatctgcatctaaagcaatggtcctttgtcaaacgagggattttgatccacttcaccattttgagttgagctttagcaaaagtttcccctcataattctttgctcttgtttcagtccaggtggaggttggttttgtagttctgccttgaggaattatgtcaacactcatacttcatctcattctcccttctgccctgcagattagattacttagcacactgtggaagtttaagtggaaggagggaatttaaaaatgggacttgagtggtttgtagaatttgtgttcataagttcagatgggtagcaaatggaatagaacttacttaaaaattggggagatttatttgaaaaccagctgtaagttgtgcattgagattatgttaaaagccttggcttaagaatttgaaaatttctttagcctgtagcaacctaaactgtaattcctatcattatgttttattactttccaattacctgtaactgacagaccaaattaattggctttgtgtcctatttagtccatcagtattttcaagtcatgtggaaagcccaaagtcatcacaatgaagagaacaggtgcacagcactgttcctcttgtgttcttgagaaggatctaatttttctgtatatagcccacatcacacttgctttgtcttgtatgttaattgcatcttcattggcttggtatttcctaaatgtttaacaagaacacaagtgttcctgataagatttcctacagtaagccagctgtattgtaagcttcccaccgtgatgatcatttttttgaagattcattgaacagccaccactctatcatcctcattttggggcagtccaagacatagctggttttagaaacccaagttcctctaagcacagcctcccgggtatgtaactgaacttggtgccaaagtacttgtgtactaatttctattactacgtactgtcactttcctcccgtgccattactgcatcataatacaaggaacctcagagcccccatttgttcattaaagaggcaactacagccaaaatcactgttaaaatcttactacttcatggagtagctcttaggaaaatatatcttcctcctgagtctgggtaattatacctctcccaagcccccattgtgtgttgaaatcctgtcatgaatccttggtagctctctgagaacagtgaagtccagggaaaggcatctggtctgtctggaaagcaaacattatgtggcctctggtagtttttttcctgtaagaatactgactttctggagtaatgagtatatatcagttattgtacatgattgctttgtgaaatgtgcaaatgatatcacctatgcagccttgtttgatttattttctctggtttgtactgttattaaaagcatattgtattatagagctattcagatattttaaatataaagatgtattgtttccgtaatatagacgtatggaatatatttaggtaatagatgtattacttggaaagttctgctttgacaaactgacaaagtctaaatgagcacatgtatcccagtgagcagtaaatcaatggaacatcccaagaagaggataaggatgcttaaaatggaaatcattctccaacgatatacaaattggacttgttcaactgctggatatatgctaccaataaccccagccccaacttaaaattcttacattcaagctcctaagagttcttaatttataactaattttaaaagagaagtttcttttctggttttagtttgggaataatcattcattaaaaaaaatgtattgtggtttatgcgaacagaccaacctggcattacagttggcctctccttgaggtgggcacagcctggcagtgtggccaggggtggccatgtaagtcccatcaggacgtagtcatgcctcctgcatttcgctacccgagtttagtaacagtgcagattccacgttcttgttccgatactctgagaagtgcctgatgttgatgtacttacagacacaagaacaatctttgctataattgtataaagccataaatgtacataaattatgtttaaatggcttggtgtctttcttttctaattatgcagaataagctctttattaggaattttttgtgaagctattaaatacttgagttaa

SEQ ID NO: 135 - DNA, 466 bp, Homo sapiens
  3' terminal sequence. epidermal growth factor receptor (avian erythroblastic leukemia viral (v-erb-b) oncogene homolog) (EGFR) gene.
  modified_base (13): a, t, c or g
  modified_base (193): a, t, c or g
  modified_base (344): a, t, c or g
  modified_base (452): a, t, c or g
tcaaatatacctntttgaaagataaatttctgctcaaagggacaatattcttgctggatgcgtttctgtaaatgcttcacagtttgaagacaaaggaatgcaacttcccaaaatgtgcccgaggtggaagtacttcctggctagtcggtgtaaacgttgcaaaaccagtctgtgggtctaagagctaatgcgngcatggctgttgggatggaggacctgctgtggcttggtcctgggtatcgaaagagtctggatttttagggctcatactatcctccgtggtcatgctccaataaattcactgctttgtggcgcgacccttaggtattctgcattttcagctntggagcccttaaagatgccatttggctttggcttccttgggaaagaagtcctgctggtagtcagggttttccagggtaatttggtggctgccttttctgggcccagtnggaggggcttttcg

SEQ ID NO: 136 - DNA, 450 bp, Homo sapiens
  5' terminal sequence. epidermal growth factor receptor (avian erythroblastic leukemia viral (v-erb-b) oncogene homolog) (EGFR) gene.
  modified_base (7): a, t, c or g
  modified_base (409): a, t, c or g
cgtcctngaatggatgaagaagacatggacgacgtggtggatgccgacgagtacctcatcccacagcagggcttcttcagcagcccctccacgtcacggactcccctcctgagctctctgagtgcaaccagcaacaattccaccgtggcttgcattgatagaaatgggctgcaaagtgtcccatcaaggaagacagcttcttgcagcgatacagctcagaccccacaggcgccttgactgaggacagcatagacgacaccttcctcccagtgcctgaatacataaaccagtccgttcccaaaaggcccgctggcttctgtgcagaatcctgttctattcacaattcagccttttgaaccccggcggcccagcaggaggacccacacttaccagggacccccacaggcantgcagtggggcaaccccgagttttttcaacattgttccagt

SEQ ID NO: 137 - DNA, 5532 bp, Homo sapiens
  epidermal growth factor receptor (avian erythroblastic leukemia viral (v-erb-b) oncogene homolog) (EGFR) gene.
gccgcgctgcgccggagtcccgagctagccccggcgccgccgccgcccagaccggacgacaggccacctcgtcggcgtccgcccgagtccccgcctcgccgccaacgccacaaccaccgcgcacggccccctgactccgtccagtattgatcgggagagccggagcgagctcttcggggagcagcgatgcgaccctccgggacggccggggcagcgctcctggcgctgctggctgcgctctgcccggcgagtcgggctctggaggaaaagaaagtttgccaaggcacgagtaacaagctcacgcagttgggcacttttgaagatcattttctcagcctccagaggatgttcaataactgtgaggtggtccttgggaatttggaaattacctatgtgcagaggaattatgatctttccttcttaaagaccatccaggaggtggctggttatgtcctcattgccctcaacacagtggagcgaattcctttggaaaacctgcagatcatcagaggaaatatgtactacgaaaattcctatgccttagcagtcttatctaactatgatgcaaataaaaccggactgaaggagctgcccatgagaaatttacaggaaatcctgcatggcgccgtgcggttcagcaacaaccctgccctgtgcaacgtggagagcatccagtggcgggacatagtcagcagtgactttctcagcaacatgtcgatggacttccagaaccacctgggcagctgccaaaagtgtgatccaagctgtcccaatgggagctgctggggtgcaggagaggagaactgccagaaactgaccaaaatcatctgtgcccagcagtgctccgggcgctgccgtggcaagtcccccagtgactgctgccacaaccagtgtgctgcaggctgcacaggcccccgggagagcgactgcctggtctgccgcaaattccgagacgaagccacgtgcaaggacacctgccccccactcatgctctacaaccccaccacgtaccagatggatgtgaaccccgagggcaaatacagctttggtgccacctgcgtgaagaagtgtccccgtaattatgtggtgacagatcacggctcgtgcgtccgagcctgtggggccgacagctatgagatggaggaagacggcgtccgcaagtgtaagaagtgcgaagggccttgccgcaaagtgtgtaacggaataggtattggtgaatttaaagactcactctccataaatgctacgaatattaaacacttcaaaaactgcacctccatcagtggcgatctccacatcctgccggtggcatttaggggtgactccttcacacatactcctcctctggatccacaggaactggatattctgaaaaccgtaaaggaaatcacagggtttttgctgattcaggcttggcctgaaaacaggacggacctccatgcctttgagaacctagaaatcatacgcggcaggaccaagcaacatggtcagttttctcttgcagtcgtcagcctgaacataacatccttgggattacgctccctcaaggagataagtgatggagatgtgataatttcaggaaacaaaaatttgtgctatgcaaatacaataaactggaaaaaactgtttgggacctccggtcagaaaaccaaaattataagcaacagaggtgaaaacagctgcaaggccacaggccaggtctgccatgccttgtgctcccccgagggctgctggggcccggagcccagggactgcgtctcttgccggaatgtcagccgaggcagggaatgcgtggacaagtgcaagcttctggagggtgagccaagggagtttgtggagaactctgagtgcatacagtgccacccagagtgcctgcctcaggccatgaacatcacctgcacaggacggggaccagacaactgtatccagtgtgcccactacattgacggcccccactgcgtcaagacctgcccggcaggagtcatgggagaaaacaacaccctggtctggaagtacgcagacgccggccatgtgtgccacctgtgccatccaaactgcacctacggatgcactgggccaggtcttgaaggctgtccaacgaatgggcctaagatcccgtccatcgccactgggatggtgggggccctcctcttgctgctggtggtggccctggggatcggcctcttcatgcgaaggcgccacatcgttcggaagcgcacgctgcggaggctgctgcaggagagggagcttgtggagcctcttacacccagtggagaagctcccaaccaagctctcttgaggatcttgaaggaaactgaattcaaaaagatcaaagtgctgggctccggtgcgttcggcacggtgtataagggactctggatcccagaaggtgagaaagttaaaattcccgtcgctatcaaggaattaagagaagcaacatctccgaaagccaacaaggaaatcctcgatgaagcctacgtgatggccagcgtggacaacccccacgtgtgccgcctgctgggcatctgcctcacctccaccgtgcaactcatcacgcagctcatgcccttcggctgcctcctggactatgtccgggaacacaaagacaatattggctcccagtacctgctcaactggtgtgtgcagatcgcaaagggcatgaactacttggaggaccgtcgcttggtgcaccgcgacctggcagccaggaacgtactggtgaaaacaccgcagcatgtcaagatcacagattttgggctggccaaactgctgggtgcggaagagaaagaataccatgcagaaggaggcaaagtgcctatcaagtggatggcattggaatcaattttacacagaatctatacccaccagagtgatgtctggagctacggggtgaccgtttgggagttgatgacctttggatccaagccatatgacggaatccctgccagcgagatctcctccatcctggagaaaggagaacgcctccctcagccacccatatgtaccatcgatgtctacatgatcatggtcaagtgctggatgatagacgcagatagtcgcccaaagttccgtgagttgatcatcgaattctccaaaatggcccgagacccccagcgctaccttgtcattcagggggatgaaagaatgcatttgccaagtcctacagactccaacttctaccgtgccctgatggatgaagaagacatggacgacgtggtggatgccgacgagtacctcatcccacagcagggcttcttcagcagcccctccacgtcacggactcccctcctgagctctctgagtgcaaccagcaacaattccaccgtggcttgcattgatagaaatgggctgcaaagctgtcccatcaaggaagacagcttcttgcagcgatacagctcagaccccacaggcgccttgactgaggacagcatagacgacaccttcctcccagtgcctgaatacataaaccagtccgttcccaaaaggcccgctggctctgtgcagaatcctgtctatcacaatcagcctctgaaccccgcgcccagcagagacccacactaccaggacccccacagcactgcagtgggcaaccccgagtatctcaacactgtccagcccacctgtgtcaacagcacattcgacagccctgcccactgggcccagaaaggcagccaccaaattagcctggacaaccctgactaccagcaggacttctttcccaaggaagccaagccaaatggcatctttaagggctccacagctgaaaatgcagaatacctaagggtcgcgccacaaagcagtgaatttattggagcatgaccacggaggatagtatgagccctaaaaatccagactctttcgatacccaggaccaagccacagcaggtcctccatcccaacagccatgcccgcattagctcttagacccacagactggttttgcaacgtttacaccgactagccaggaagtacttccacctcgggcacattttgggaagttgcattcctttgtcttcaaactgtgaagcatttacagaaacgcatccagcaagaatattgtccctttgagcagaaatttatctttcaaagaggtatatttgaaaaaaaaaaaaaaagtatatgtgaggatttttattgattggggatcttggagtttttcattgtcgctattgatttttacttcaatgggctcttccaacaaggaagaagcttgctggtagcacttgctaccctgagttcatccaggcccaactgtgagcaaggagcacaagccacaagtcttccagaggatgcttgattccagtggttctgcttcaaggcttccactgcaaaacactaaagatccaagaaggccttcatggccccagcaggccggatcggtactgtatcaagtcatggcaggtacagtaggataagccactctgtcccttcctgggcaaagaagaaacggaggggatgaattcttccttagacttacttttgtaaaaatgtccccacggtacttactccccactgatggaccagtggtttccagtcatgagcgttagactgacttgtttgtcttccattccattgttttgaaactcagtatgccgcccctgtcttgctgtcatgaaatcagcaagagaggatgacacatcaaataataactcggattccagcccacattggattcatcagcatttggaccaatagcccacagctgagaatgtggaatacctaaggataacaccgcttttgttctcgcaaaaacgtatctcctaatttgaggctcagatgaaatgcatcaggtcctttggggcatagatcagaagactacaaaaatgaagctgctctgaaatctcctttagccatcaccccaaccccccaaaattagtttgtgttacttatggaagatagttttctccttttacttcacttcaaaagctttttactcaaagagtatatgttccctccaggtcagctgcccccaaaccccctccttacgctttgtcacacaaaaagtgtctctgccttgagtcatctattcaagcacttacagctctggccacaacagggcattttacaggtgcgaatgacagtagcattatgagtagtgtgaattcaggtagtaaatatgaaactagggtttgaaattgataatgctttcacaacatttgcagatgttttagaaggaaaaaagttccttcctaaaataatttctctacaattggaagattggaagattcagctagttaggagcccattttttcctaatctgtgtgtgccctgtaacctgactggttaacagcagtcctttgtaaacagtgttttaaactctcctagtcaatatccaccccatccaatttatcaaggaagaaatggttcagaaaatattttcagcctacagttatgttcagtcacacacacatacaaaatgttccttttgcttttaaagtaatttttgactcccagatcagtcagagcccctacagcattgttaagaaagtatttgatttttgtctcaatgaaaataaaactatattcatttcc

SEQ ID NO: 138 - DNA, 378 bp, Homo sapiens
  3' terminal sequence. tek tyrosine kinase, endothelial (venous malformations, multiple cutaneous and mucosal) (TEK) gene.
  modified_base (5): a, t, c or g
  modified_base (9): a, t, c or g
  modified_base (14): a, t, c or g
  modified_base (311): a, t, c or g
  modified_base (346): a, t, c or g
  modified_base (369): a, t, c or g
ggatnagantttanaggcaagacatttattcactcatgatatatcagtgcaaagtgtgcctacagtatacaaggtaaactcacaactcatcaaaactaaaactttttacaatgtgcaatacatgtagggatattaattcaatatataaatgtcacatgtctcccaaatgtcacccaggctttctgttatttcttaaaatatacaagtcaatattaccagagaaaagataagaaaatcccattattttatcctaaacttatgtatacttctctaaagattcttagggcttgtaagcaatgaggtttaaggcnattttttaggatgttagcatcccggggctgacttngccgggctgtgggaaccccaggnccggagtgg

SEQ ID NO: 139 - DNA, 447 bp, Homo sapiens
  5' terminal sequence. tek tyrosine kinase, endothelial (venous malformations, multiple cutaneous and mucosal) (TEK) gene.
  modified_base (350): a, t, c or g
gctttcactggcatgggagacccttgacacctgctgagaaaacatgcctctgccaaaggatgtgatatataagtgtacatatgtgctgtacacctgggaccttcaccactgtagatcccatgcatggatctatgtagtatgctctgactctaataggactgtatatactgttttaagaatgggctgaaatcagaatgcctgtttgtggtttcatatgcaataatatatttttttaaaaatgtggacttcataggaaggcgtgagtacaattagtataatgcataactcattgttgtcctaggatattttgatatttacctttatgttggaatgctattaaatgttttccngtgtccaaagtaaaatattgtttaataaacctaacaatggaccccgatagtacagggttaagtgaggggaaccttatggattctaacaagtcctagg

SEQ ID NO: 140 - DNA, 4138 bp, Homo sapiens
  tek tyrosine kinase, endothelial (venous malformations, multiple cutaneous and mucosal) (TEK) gene.
cttctgtgctgttccttcttgcctctaacttgtaaacaagacgtactaggacgatgctaatggaaagtcacaaaccgctgggtttttgaaaggatccttgggacctcatgcacatttgtggaaactggatggagagatttggggaagcatggactctttagccagcttagttctctgtggagtcagcttgctcctttctggaactgtggaaggtgccatggacttgatcttgatcaattccctacctcttgtatctgatgctgaaacatctctcacctgcattgcctctgggtggcgcccccatgagcccatcaccataggaagggactttgaagccttaatgaaccagcaccaggatccgctggaagttactcaagatgtgaccagagaatgggctaaaaaagttgtttggaagagagaaaaggctagtaagatcaatggtgcttatttctgtgaagggcgagttcgaggagaggcaatcaggatacgaaccatgaagatgcgtcaacaagcttccttcctaccagctactttaactatgactgtggacaagggagataacgtgaacatatctttcaaaaaggtattgattaaagaagaagatgcagtgatttacaaaaatggttccttcatccattcagtgccccggcatgaagtacctgatattctagaagtacacctgcctcatgctcagccccaggatgctggagtgtactcggccaggtatataggaggaaacctcttcacctcggccttcaccaggctgatagtccggagatgtgaagcccagaagtggggacctgaatgcaaccatctctgtactgcttgtatgaacaatggtgtctgccatgaagatactggagaatgcatttgccctcctgggtttatgggaaggacgtgtgagaaggcttgtgaactgcacacgtttggcagaacttgtaaagaaaggtgcagtggacaagagggatgcaagtcttatgtgttctgtctccctgacccctatgggtgttcctgtgccacaggctggaagggtctgcagtgcaatgaagcatgccaccctggtttttacgggccagattgtaagcttaggtgcagctgcaacaatggggagatgtgtgatcgcttccaaggatgtctctgctctccaggatggcaggggctccagtgtgagagagaaggcataccgaggatgaccccaaagatagtggatttgccagatcatatagaagtaaacagtggtaaatttaatcccatttgcaaagcttctggctggccgctacctactaatgaagaaatgaccctggtgaagccggatgggacagtgctccatccaaaagactttaaccatacggatcatttctcagtagccatattcaccatccaccggatcctcccccctgactcaggagtttgggtctgcagtgtgaacacagtggctgggatggtggaaaagcccttcaacatttctgttaaagttcttccaaagcccctgaatgccccaaacgtgattgacactggacataactttgctgtcatcaacatcagctctgagccttactttggggatggaccaatcaaatccaagaagcttctatacaaacccgttaatcactatgaggcttggcaacatattcaagtgacaaatgagattgttacactcaactatttggaacctcggacagaatatgaactctgtgtgcaactggtccgtcgtggagagggtggggaagggcatcctggacctgtgagacgcttcacaacagcttctatcggactccctcctccaagaggtctaaatctcctgcctaaaagtcagaccactctaaatttgacctggcaaccaatatttccaagctcggaagatgacttttatgttgaagtggagagaaggtctgtgcaaaaaagtgatcagcagaatattaaagttccaggcaacttgacttcggtgctacttaacaacttacatcccagggagcagtacgtggtccgagctagagtcaacaccaaggcccagggggaatggagtgaagatctcactgcttggacccttagtgacattcttcctcctcaaccagaaaacatcaagatttccaacattacacactcctcggctgtgatttcttggacaatattggatggctattctatttcttctattactatccgttacaaggttcaaggcaagaatgaagaccagcacgttgatgtgaagataaagaatgccaccatcattcagtatcagctcaagggcctagagcctgaaacagcataccaggtggacatttttgcagagaacaacatagggtcaagcaacccagccttttctcatgaactggtgaccctcccagaatctcaagcaccagcggacctcggaggggggaagatgctgcttatagccatccttggctctgctggaatgacctgcctgactgtgctgttggcctttctgatcatattgcaattgaagagggcaaatgtgcaaaggagaatggcccaagccttccaaaacgtgagggaagaaccagctgtgcagttcaactcagggactctggccctaaacaggaaggtcaaaaacaacccagatcctacaatttatccagtgcttgactggaatgacatcaaatttcaagatgtgattggggagggcaattttggccaagttcttaaggcgcgcatcaagaaggatgggttacggatggatgctgccatcaaaagaatgaaagaatatgcctccaaagatgatcacagggactttgcaggagaactggaagttctttgtaaacttggacaccatccaaacatcatcaatctcttaggagcatgtgaacatcgaggctacttgtacctggccattgagtacgcgccccatggaaaccttctggacttccttcgcaagagccgtgtgctggagacggacccagcatttgccattgccaatagcaccgcgtccacactgtcctcccagcagctccttcacttcgctgccgacgtggcccggggcatggactacttgagccaaaaacagtttatccacagggatctggctgccagaaacattttagttggtgaaaactatgtggcaaaaatagcagattttggattgtcccgaggtcaagaggtgtacgtgaaaaagacaatgggaaggctcccagtgcgctggatggccatcgagtcactgaattacagtgtgtacacaaccaacagtgatgtatggtcctatggtgtgttactatgggagattgttagcttaggaggcacaccctactgcgggatgacttgtgcagaactctacgagaagctgccccagggctacagactggagaagcccctgaactgtgatgatgaggtgtatgatctaatgagacaatgctggcgggagaagccttatgagaggccatcatttgcccagatattggtgtccttaaacagaatgttagaggagcgaaagacctacgtgaataccacgctttatgagaagtttacttatgcaggaattgactgttctgctgaagaagcggcctaggacagaacatctgtataccctctgtttccctttcactggcatgggagacccttgacaactgctgagaaaacatgcctctgccaaaggatgtgatatataagtgtacatatgtgctggaattctaacaagtcataggttaatatttaagacactgaaaaatctaagtgatataaatcagattcttctctctcattttatccctcacctgtagcatgccagtcccgtttcatttagtcatgtgaccactctgtcttgtgtttccacagcctgcaagttcagtccaggatgctaacatctaaaaatagacttaaatctcattgcttacaagcctaagaatctttagagaagtatacataagtttaggataaaataatgggattttcttttcttttctctggtaatattgacttgtatattttaagaaataacagaaagcctgggtgacatttgggagacatgtgacatttatatattgaattaatatccctacatgtattgcacattgtaaaaagttttagttttgatgagttgtgagtttaccttgtatactgtaggcacactttgcactgatatatcatgagtgaataaatgtcttgcctactcaaaaaaaaaaaa

SEQ ID NO: 141 - DNA, 395 bp, Homo sapiens
  3' terminal sequence. tumor necrosis factor receptor superfamily, member 6 (TNFRSF6) gene.
  modified_base (64): a, t, c or g
  modified_base (340): a, t, c or g
  modified_base (382): a, t, c or g
taattccaaacacaaggggcaaaaaaatcctccataaatggaagttctttaggtggttccaggnatctgcttcagtttataactatcttcacagtttacatttacagaaatataaatattatttcttaaaattcacatttaatacaaactttcaaagatatttaaacgtaggatagtagtaaggagaatcttaaatcttagaaacttgggggtatgacaagagcaattcctaaatccagatgatgattttaccattgctatgtataagctgccatttgtaggcaggttttacatggggacattattgaacattttcggggggtggggggaaaaataaggnatctattttatccatctttggattggcaaacctggggttcangacatgttcacaa

SEQ ID NO: 142 - DNA, 461 bp, Homo sapiens
  5' terminal sequence. tumor necrosis factor receptor superfamily, member 6 (TNFRSF6) gene.
  modified_base (401): a, t, c or g
  modified_base (448): a, t, c or g
tcgtaattggcatcaacttcatggaaagaaagaagcgtatgacacattgattaaagatctcaaaaaagccaatctttgtactcttgcagagaaaattcagactatcatcctcaaggacattactagtgactcagaaaattcaaacttcagaaatgaaatccaaagcttggtctagagtgaaaaacaacaaattcagttctgagtatatgcaattagtgtttgaaaagattcttaatagctggctgtaaatactgcttggttttttactgggtacattttatcatttattagcgctgaagagccaacatatttgtaggtttttaatatctccatggattctgcctccaagggtgtttaaaatctagttgggggaaacaaacttccttcaagggttaaatgcngtggcctggctaagtacccccattagggagtgtttgccgggggttgnaaggtttaggttt

SEQ ID NO: 143 - DNA, 2551 bp, Homo sapiens
  tumor necrosis factor receptor superfamily, member 6 (TNFRSF6) gene.
gcaagagtgacacacaggtgttcaaagacgcttctggggagtgagggaagcggtttacgagtgacttggctggagcctcaggggcgggcactggcacggaacacaccctgaggccagccctggctgcccaggcggagctgcctcttctcccgcgggttggtggacccgctcagtacggagttggggaagctctttcacttcggaggattgctcaacaaccatgctgggcatctggaccctcctacctctggttcttacgtctgttgctagattatcgtccaaaagtgttaatgcccaagtgactgacatcaactccaagggattggaattgaggaagactgttactacagttgagactcagaacttggaaggcctgcatcatgatggccaattctgccataagccctgtcctccaggtgaaaggaaagctagggactgcacagtcaatggggatgaaccagactgcgtgccctgccaagaagggaaggagtacacagacaaagcccatttttcttccaaatgcagaagatgtagattgtgtgatgaaggacatggcttagaagtggaaataaactgcacccggacccagaataccaagtgcagatgtaaaccaaactttttttgtaactctactgtatgtgaacactgtgacccttgcaccaaatgtgaacatggaatcatcaaggaatgcacactcaccagcaacaccaagtgcaaagaggaaggatccagatctaacttggggtggctttgtcttcttcttttgccaattccactaattgtttgggtgaagagaaaggaagtacagaaaacatgcagaaagcacagaaaggaaaaccaaggttctcatgaatctccaaccttaaatcctgaaacagtggcaataaatttatctgatgttgacttgagtaaatatatcaccactattgctggagtcatgacactaagtcaagttaaaggctttgttcgaaagaatggtgtcaatgaagccaaaatagatgagatcaagaatgacaatgtccaagacacagcagaacagaaagttcaactgcttcgtaattggcatcaacttcatggaaagaaagaagcgtatgacacattgattaaagatctcaaaaaagccaatctttgtactcttgcagagaaaattcagactatcatcctcaaggacattactagtgactcagaaaattcaaacttcagaaatgaaatccaaagcttggtctagagtgaaaaacaacaaattcagttctgagtatatgcaattagtgtttgaaaagattcttaatagctggctgtaaatactgcttggttttttactgggtacattttatcatttattagcgctgaagagccaacatatttgtagatttttaatatctcatgattctgcctccaaggatgtttaaaatctagttgggaaaacaaacttcatcaagagtaaatgcagtggcatgctaagtacccaaataggagtgtatgcagaggatgaaagattaagattatgctctggcatctaacatatgattctgtagtatgaatgtaatcagtgtatgttagtacaaatgtctatccacaggctaaccccactctatgaatcaatagaagaagctatgaccttttgctgaaatatcagttactgaacaggcaggccactttgcctctaaattacctctgataattctagagattttaccatatttctaaactttgtttataactctgagaagatcatatttatgtaaagtatatgtatttgagtgcagaatttaaataaggctctacctcaaagacctttgcacagtttattggtgtcatattatacaatatttcaattgtgaattcacatagaaaacattaaattataatgtttgactattatatatgtgtatgcattttactggctcaaaactacctacttctttctcaggcatcaaaagcattttgagcaggagagtattactagagctttgccacctctccatttttgccttggtgctcatcttaatggcctaatgcacccccaaacatggaaatatcaccaaaaaatacttaatagtccaccaaaaggcaagactgcccttagaaattctagcctggtttggagatactaactgctctcagagaaagtagctttgtgacatgtcatgaacccatgtttgcaatcaaagatgataaaatagattcttatttttcccccacccccgaaaatgttcaataatgtcccatgtaaaacctgctacaaatggcagcttatacatagcaatggtaaaatcatcatctggatttaggaattgctcttgtcatacccccaagtttctaagatttaagattctccttactactatcctacgtttaaatatctttgaaagtttgtattaaatgtgaattttaagaaataatatttatatttctgtaaatgtaaactgtgaagatagttataaactgaagcagatacctggaaccacctaaagaacttccatttatggaggatttttttgccccttgtgtttggaattataaaatataggtaaaagtacgtaattaaata

SEQ ID NO: 144 - DNA, 434 bp, Homo sapiens
  3' terminal sequence. cyclin-dependent kinase inhibitor 1a (p21, cip1) (CDKN1A) gene.
  modified_base (24): a, t, c or g
  modified_base (198): a, t, c or g
  modified_base (426): a, t, c or g
aaagtcactaagaatcatttattnagcacctgctgtatattcagcattgtgggaggagctgtgaaagacacagaacagtacagggtgtggtccctgccctcgagaggtttacagtctaggtggagaaacgggaaccaggacacatggggagccgagagaaaacagtccaggccagtatgttacaggagctggaaggtntttggggtcagaccccaatactccaagtacactaagcacttcagtccttccaggggctcaacgttagtgccaggaaagacaactactcccagccccatatgagcccacgtggcatgccctgtccatagcctctactgccaccatcttaaaatgtctgactccttgttccgctggctaattcaaagtgcaatgaactggggagggatggggtggatgaggaaggttcgntggacgtt

SEQ ID NO: 145 - DNA, 257 bp, Homo sapiens
  5' terminal sequence. cyclin-dependent kinase inhibitor 1a (p21, cip1) (CDKN1A) gene.
  modified_base (11): a, t, c or g
  modified_base (13): a, t, c or g
  modified_base (192): a, t, c or g
  modified_base (194): a, t, c or g
  modified_base (197): a, t, c or g
cttgtgctgcntncaggggagcaggctgaagggtccccaggtggacctggagactctcagggtcgaaaacggcggcagaccagcatgacagatttctaccactccaaacgccggctgatcttctccaagaggaagccctaatccgcccacaggaagcctgcagtcctggaagcgcgagggcctcaaaggccntnctnacatcttctgccttagtctcagtttgtgtgtcttaattattatttgtgttttaaattttt

SEQ ID NO: 146 - DNA, 2121 bp, Homo sapiens
  cyclin-dependent kinase inhibitor 1a (p21, cip1) (CDKN1A) gene.
gccgaagtcagttccttgtggagccggagctgggcgcggattcgccgaggcaccgaggcactcagaggaggcgccatgtcagaaccggctggggatgtccgtcagaacccatgcggcagcaaggcctgccgccgcctcttcggcccagtggacagcgagcagctgagccgcgactgtgatgcgctaatggcgggctgcatccaggaggcccgtgagcgatggaacttcgactttgtcaccgagacaccactggagggtgacttcgcctgggagcgtgtgcggggccttggcctgcccaagctctaccttcccacggggccccggcgaggccgggatgagttgggaggaggcaggcggcctggcacctcacctgctctgctgcaggggacagcagaggaagaccatgtggacctgtcactgtcttgtacccttgtgcctcgctcaggggagcaggctgaagggtccccaggtggacctggagactctcagggtcgaaaacggcggcagaccagcatgacagatttctaccactccaaacgccggctgatcttctccaagaggaagccctaatccgcccacaggaagcctgcagtcctggaagcgcgagggcctcaaaggcccgctctacatcttctgccttagtctcagtttgtgtgtcttaattattatttgtgttttaatttaaacacctcctcatgtacataccctggccgccccctgccccccagcctctggcattagaattatttaaacaaaaactaggcggttgaatgagaggttcctaagagtgctgggcatttttattttatgaaatactatttaaagcctcctcatcccgtgttctccttttcctctctcccggaggttgggtgggccggcttcatgccagctacttcctcctccccacttgtccgctgggtggtaccctctggaggggtgtggctccttcccatcgctgtcacaggcggttatgaaattcaccccctttcctggacactcagacctgaattctttttcatttgagaagtaaacagatggcactttgaaggggcctcaccgagtgggggcatcatcaaaaactttggagtcccctcacctcctctaaggttgggcagggtgaccctgaagtgagcacagcctagggctgagctggggacctggtaccctcctggctcttgatacccccctctgtcttgtgaaggcagggggaaggtggggtactggagcagaccaccccgcctgccctcatggcccctctgacctgcactggggagcccgtctcagtgttgagccttttccctctttggctcccctgtaccttttgaggagccccagcttacccttcttctccagctgggctctgcaattcccctctgctgctgtccctcccccttgtctttcccttcagtaccctctcatgctccaggtggctctgaggtgcctgtcccacccccacccccagctcaatggactggaaggggaagggacacacaagaagaagggcaccctagttctacctcaggcagctcaagcagcgaccgccccctcctctagctgtgggggtgagggtcccatgtggtggcacaggcccccttgagtggggttatctctgtgttaggggtatatgatgggggagtagatctttctaggagggagacactggcccctcaaatcgtccagcgaccttcctcatccaccccatccctccccagttcattgcactttgattagcagcggaacaaggagtcagacattttaagatggtggcagtagaggctatggacagggcatgccacgtgggctcatatggggctgggagtagttgtctttcctggcactaacgttgagcccctggaggcactgaagtgcttagtgtacttggagtattggggtctgaccccaaacaccttccagctcctgtaacatactggcctggactgttttctctcggctccccatgtgtcctggttcccgtttctccacctagactgtaaacctctcgagggcagggaccacaccctgtactgttctgtgtctttcacagctcctcccacaatgctgaatatacagcaggtgctcaataaatgattcttagtgactttaaaaaaaaaaaaaaaaaaa

SEQ ID NO: 147 - DNA, 452 bp, Homo sapiens
  3' terminal sequence. phospholipase a2, group iia (platelets, synovial fluid) (PLA2G2A) gene.
  modified_base (295): a, t, c or g
  modified_base (338): a, t, c or g
  modified_base (357): a, t, c or g
  modified_base (405): a, t, c or g
gatttgctaattgctttattcagaagagaccccccggagtacagcttctttggttaagcacggagttgaggtggaggagagcagtagaaggctggaaatctgctggatgtctcattctgggtgggtatagaagggctcctgcctggcctctaggatgggtgagggatgctttctgcatggccaaggaacttggttagggtagggagggagggtatgagagagggaaattcagcactgggtggaaggtttccagggaagaggggactcagcaacgaggggtgctccctctgcagtntttattggaatagtactggtactttttattgtaggtcgtcttntttctagcaaaacagggtngcagcagccttatcacacttcacacagttgacttctgcaggagtcccntttttgcacaggttgattctgctccccgaagttactaaacttttttt

SEQ ID NO: 148 - DNA, 379 bp, Homo sapiens
  5' terminal sequence. phospholipase a2, group iia (platelets, synovial fluid) (PLA2G2A) gene.
  modified_base (362): a, t, c or g
tggagtcctctgagagagccaccaaggaggagcaggggagcgacggccggggcagaagttgagaccacccagcagaggagctaggccagtccatctgcatttgtcacccaagaactcttaccatgaagaccctcctactgttggcagtgatcatgatctttggcctactgcaggcccatgggaatttggtgaatttccacagaatgatcaagttgacgacaggaaaggaagccgcactcagttatggcttctacggctgccactgtggcgtgggttgcagaggatcccccaaggatgcaacggattcgctgctgtgtcactcatgactgtttgctacaaacgtctgggagaaacgtgggttnttggcaccaaatttttt

SEQ ID NO: 149 - DNA, 854 bp, Homo sapiens
  phospholipase a2, group iia (platelets, synovial fluid) (PLA2G2A) gene.
gaattcccaactctggagtcctctgagagagccaccaaggaggagcaggggagcgacggccggggcagaagttgagaccacccagcagaggagctaggccagtccatctgcatttgtcacccaagaactcttaccatgaagaccctcctactgttggcagtgatcatgatctttggcctactgcaggcccatgggaatttggtgaatttccacagaatgatcaagttgacgacaggaaaggaagccgcactcagttatggcttctacggctgccactgtggcgtgggtggcagaggatcccccaaggatgcaacggatcgctgctgtgtcactcatgactgttgctacaaacgtctggagaaacgtggatgtggcaccaaatttctgagctacaagtttagcaactcggggagcagaatcacctgtgcaaaacaggactcctgcagaagtcaactgtgtgagtgtgataaggctgctgccacctgttttgctagaaacaagacgacctacaataaaaagtaccagtactattccaataaacactgcagagggagcacccctcgttgctgagtcccctcttccctggaaaccttccacccagtgctgaatttccctctctcataccctccctccctaccctaaccaagttccttggccatgcagaaagcatccctcacccatcctagaggccaggcaggagcccttctatacccacccagaatgagacatccagcagatttccagccttctactgctctcctccacctcaactccgtgcttaaccaaagaagctgtactccggggggtctcttctgaataaagcaattagcaaatcaaaaaaaaaaaaggaattc

SEQ ID NO: 150 - DNA, 224 bp, Homo sapiens
  3' terminal sequence. glyceraldehyde-3-phosphate dehydrogenase (GAPD) gene.
  modified_base (15): a, t, c or g
  modified_base (29): a, t, c or g
  modified_base (65): a, t, c or g
  modified_base (89): a, t, c or g
  modified_base (126): a, t, c or g
  modified_base (169): a, t, c or g
  modified_base (177): a, t, c or g
  modified_base (184): a, t, c or g
  modified_base (191): a, t, c or g
  modified_base (198): a, t, c or g
  modified_base (200): a, t, c or g
  modified_base (219): a, t, c or g
ggttgagcacagggnactttattgatggnacatgacaaggtgcggctccctaggcccctcccctnttcaaggggtctacatggcaactntgaggaggggagattcagtgtggtgggggactgagtntggcagggactccccagcagtgagggtctctctcttcctcttntgctcttnctggggntggtggnccagggntnttactccttggaggccatntgggc

SEQ ID NO: 151 - DNA, 359 bp, Homo sapiens
  5' terminal sequence. glyceraldehyde-3-phosphate dehydrogenase (GAPD) gene.
  modified_base (305): a, t, c or g
gcgctgagtacgtcgtggagtccactggcgtcttcaccaccatggagaaggctggggctcatttgcaggggggagccaaaagggtcatcatctctgccccctctgctgatgcccccatgttcgtcatgggtgtgaaccatgagaagtatgacaacagcctcaagatcatcagcaatgcctcctgcaccaccaactgcttagcacccctgggccaaggtcatccatgacaactttggtatcgtggaaggactcatgaccacagtccatgccatcactgccacccagaagactgtggatggcccctncgggaaactgtgggcgtgatggccgcggggttctttcagaacatcatccctgcc

SEQ ID NO: 152 - DNA, 1283 bp, Homo sapiens
  glyceraldehyde-3-phosphate dehydrogenase (GAPD) gene.
ctctctgctcctcctgttcgacagtcagccgcatcttcttttgcgtcgccagccgagccacatcgctcagacaccatggggaaggtgaaggtcggagtcaacggatttggtcgtattgggcgcctggtcaccagggctgcttttaactctggtaaagtggatattgttgccatcaatgaccccttcattgacctcaactacatggtttacatgttccaatatgattccacccatggcaaattccatggcaccgtcaaggctgagaacgggaagcttgtcatcaatggaaatcccatcaccatcttccaggagcgagatccctccaaaatcaagtggggcgatgctggcgctgagtacgtcgtggagtccactggcgtcttcaccaccatggagaaggctggggctcatttgcaggggggagccaaaagggtcatcatctctgccccctctgctgatgcccccatgttcgtcatgggtgtgaaccatgagaagtatgacaacagcctcaagatcatcagcaatgcctcctgcaccaccaactgcttagcacccctggccaaggtcatccatgacaactttggtatcgtggaaggactcatgaccacagtccatgccatcactgccacccagaagactgtggatggcccctccgggaaactgtggcgtgatggccgcggggctctccagaacatcatccctgcctctactggcgctgccaaggctgtgggcaaggtcatccctgagctgaacgggaagctcactggcatggccttccgtgtccccactgccaacgtgtcagtggtggacctgacctgccgtctagaaaaacctgccaaatatgatgacatcaagaaggtggtgaagcaggcgtcggagggccccctcaagggcatcctgggctacactgagcaccaggtggtctcctctgacttcaacagcgacacccactcctccacctttgacgctggggctggcattgccctcaacgaccactttgtcaagctcatttcctggtatgacaacgaatttggctacagcaacagggtggtggacctcatggcccacatggcctccaaggagtaagacccctggaccaccagccccagcaagagcacaagaggaagagagagaccctcactgctggggagtccctgccacactcagtcccccaccacactgaatctcccctcctcacagttgccatgtagaccccttgaagaggggaggggcctagggagccgcaccttgtcatgtaccatcaataaagtaccctgtgctcaacc

SEQ ID NO: 153 - DNA, 361 bp, Homo sapiens
  3' terminal sequence. jun b proto-oncogene (JUNB) gene.
  modified_base (20): a, t, c or g
  modified_base (186): a, t, c or g
  modified_base (189): a, t, c or g
  modified_base (191): a, t, c or g
  modified_base (241): a, t, c or g
  modified_base (249): a, t, c or g
  modified_base (254): a, t, c or g
  modified_base (305): a, t, c or g
  modified_base (318): a, t, c or g
  modified_base (329): a, t, c or g
  modified_base (339): a, t, c or g
  modified_base (352): a, t, c or g
tacttaaatagattcaatanaaagaacaaacacacacaaacacaaacacgtcttaaaataaactctttagagactaagtgcgtgtttcttttccacagtacggtgcagagaggggagggcagggggcgggggtcccttcccaatgtccccgcgggcttgagtaccaggcggcggggccagctcccntantncgccccctcttcccctccctgttaaatacacaaatatattatattcaatntgaatcgngtctntttccagcagaaaaaaaacatacaaaaaaaagtgggaaggggggggctttnttaaacgttcganggttggaaggnctttggggcncaggggtaggganggcccgagt

SEQ ID NO: 154 - DNA, 401 bp, Homo sapiens
  5' terminal sequence. jun b proto-oncogene (JUNB) gene.
  modified_base (14): a, t, c or g
  modified_base (22): a, t, c or g
  modified_base (40): a, t, c or g
  modified_base (67): a, t, c or g
  modified_base (127): a, t, c or g
  modified_base (195): a, t, c or g
  modified_base (206): a, t, c or g
  modified_base (208): a, t, c or g
  modified_base (220): a, t, c or g
  modified_base (282): a, t, c or g
  modified_base (291): a, t, c or g
  modified_base (310): a, t, c or g
  modified_base (337): a, t, c or g
  modified_base (353): a, t, c or g
  modified_base (363): a, t, c or g
  modified_base (378): a, t, c or g
agcgcatcaaagtngagcgcangccttgcggaaccggctngcggccaccaagtgccggaagcggaantgggagcgcatcgggcttgggaggacaaggtgaagacgctcaaggccgagaacgcggggntgtcgagtaccgccggcttcctccgggagcaggtggcccagctcaaacagaaggtcatgacccacgtnagcaacggctntnagctgctgcttngggtcaagggacacgccttctggaacgttccctgcccctttacgggacacccccttcgtttnggacggttnggcacacggtttcccactngggttccagggtagcaggcggtggggnacccacctgggggacntagggggcgnccgcaaaccacattnggatttccggccttcttaacctt

SEQ ID NO: 155 - DNA, 1797 bp, Homo sapiens
  jun b proto-oncogene (JUNB) gene.
ccagcagggagctgggagctgggggaaacgacgccaggaaagctatcgcgccagagagggcgacgggggctcgggaagcctgacagggcttttgcgcacagctgccggctggctgctacccgcccgcgccagcccccgagaacgcgcgaccaggcacccagtccggtcaccgcagcggagagctcgccgctcgctgcagcgaggcccggagcggccccgcagggaccctccccagaccgcctgggccgcccggatgtgcactaaaatggaacagcccttctaccacgacgactcatacacagctacgggatacggccgggcccctggtggcctctctctacacgactacaaactcctgaaaccgagcctggcggtcaacctggccgacccctaccggagtctcaaagcgcctggggctcgcggacccggcccagagggcggcggtggcggcagctacttttctggtcagggctcggacaccggcgcgtctctcaagctcgcctcttcggagctggaacgcctgattgtccccaacagcaacggcgtgatcacgacgacgcctacacccccgggacagtacttttacccccgcgggggtggcagcggtggaggtgcagggggcgcagggggcggcgtcaccgaggagcaggagggcttcgccgacggctttgtcaaagccctggacgatctgcacaagatgaaccacgtgacaccccccaacgtgtccctgggcgctaccggggggcccccggctgggcccgggggcgtctacgccggcccggagccacctcccgtttacaccaacctcagcagctactccccagcctctgcgtcctcgggaggcgccggggctgccgtcgggaccgggagctcgtacccgacgaccaccatcagctacctcccacacgcgccgcccttcgccggtggccacccggcgcagctgggcttgggccgcggcgcctccaccttcaaggaggaaccgcagaccgtgccggaggcgcgcagccgggacgccacgccgccggtgtcccccatcaacatggaagaccaagagcgcatcaaagtggagcgcaagcggctgcggaaccggctggcggccaccaagtgccggaagcggaagctggagcgcatcgcgcgcctggaggacaaggtgaagacgctcaaggccgagaacgcggggctgtcgagtaccgccggcctcctccgggagcaggtggcccagctcaaacagaaggtcatgacccacgtcagcaacggctgtcagctgctgcttggggtcaagggacacgccttctgaacgtcccctgcccctttacggacaccccctcgcttggacggctgggcacacgcctcccactggggtccagggagcaggcggtgggcacccaccctgggacctaggggcgccgcaaaccacactggactccggcccccctaccctgcgcccagtccttccacctcgacgtttacaagcccccccttccacttttttttgtatgttttttttctgctggaaacagactcgattcatattgaatataatatatttgtgtatttaacagggaggggaagagggggcgatcgcggcggagctggccccgccgcctggtactcaagcccgcggggacattgggaaggggacccccgccccctgccctcccctctctgcaccgtactgtggaaaagaaacacgcacttagtctctaaagagtttattttaagacgtgtttgtgtttgtgtgtgtttgttctttttattgaatctatttaagtaaaaaaaaaattggttctttattaa

SEQ ID NO: 156 - DNA, 335 bp, Homo sapiens
  3' terminal sequence. cellular retinoic acid-binding protein 2 (CRABP2) gene.
  modified_base (322): a, t, c or g
aagcattttaataaaattaacaaataaatattctaaactgtataggctacagggacaaagggtagaagctagagggccagtctttcctgctcaggccctcaagtcccctttagagagaccctgctctgggctggtttggggctaggactgctgacttggggaggcggggagtgaacccggaatgggtgatctgggctcttgcagccattcctctttgttggtgtaggggaggagagaagaggtcaaagaaagcaagaccctgcaagaggcatcccagtgacccccagaagtgactggggtaaggggagcgctatcctagganggtgggggtgggt

SEQ ID NO: 157 - DNA, 481 bp, Homo sapiens
  5' terminal sequence. cellular retinoic acid-binding protein 2 (CRABP2) gene.
  modified_base (192): a, t, c or g
  modified_base (229): a, t, c or g
  modified_base (249): a, t, c or g
  modified_base (329): a, t, c or g
  modified_base (352): a, t, c or g
  modified_base (381): a, t, c or g
  modified_base (439): a, t, c or g
  modified_base (455): a, t, c or g
  modified_base (465): a, t, c or g
  modified_base (474): a, t, c or g
gcctggacttgtcttgggttccagaacctgacgacccggcgacgcgacgtctcttttgactaaaagacagtgtccagtgctccagcctaggagtctacggggaccgcctcccgcgccgccaccatgcccaacttctctggcaactggaaaatcatccgatcggaaaacttcgaggaattgctcaaagtgctnggggtgaatgtgatgctgaggaagattgctgtggctncagcgtccaagccagcagtngagatcaaacaggagggagacactttctacatcaaaacctccaccaccgtgcggcaccacagagattaacttcaaggttngggaggagtttgagggagcagantgtgggtggggaggccctgttaaggagcngggtgaaatggggagagtgaggattaaatggtcttttgagcagaagttcctgaagggngaggggccccaagacntcttggaccngagaatttncccacgt

SEQ ID NO: 158 - DNA, 969 bp, Homo sapiens
  cellular retinoic acid-binding protein 2 (CRABP2) gene.
agctttggggttgtccctggacttgtcttggttccagaacctgacgacccggcgacggcgacgtctcttttgactaaaagacagtgtccagtgctccagcctaggagtctacggggaccgcctcccgcgccgccaccatgcccaacttctctggcaactggaaaatcatccgatcggaaaacttcgaggaattgctcaaagtgctgggggtgaatgtgatgctgaggaagattgctgtggctgcagcgtccaagccagcagtggagatcaaacaggagggagacactttctacatcaaaacctccaccaccgtgcgcaccacagagattaacttcaaggttggggaggagtttgaggagcagactgtggatgggaggccctgtaagagcctggtgaaatgggagagtgagaataaaatggtctgtgagcagaagctcctgaagggagagggccccaagacctcgtggaccagagaactgaccaacgatggggaactgatcctgaccatgacggcggatgacgttgtgtgcaccagggtctacgtccgagagtgagtggccacaggtagaaccgcggccgaagcccaccactggccatgctcaccgccctgcttcactgccccctccgtcccaccccctccttctaggatagcgctccccttaccccagtcacttctgggggtcactgggatgcctcttgcagggtcttgctttctttgacctcttctctcctcccctacaccaacaaagaggaatggctgcaagagcccagatcacccattccgggttcactccccgcctccccaagtcagcagtcctagccccaaaccagcccagagcagggtctctctaaaggggacttgagggcctgagcaggaaagactggccctctagcttctaccctttgtccctgtagcctatacagtttagaatatttatttgttaattttattaaaatgctttaaaaaaa

SEQ ID NO: 159 - DNA, 344 bp, Homo sapiens
  3' terminal sequence. activin a receptor type ii-like 1 (ACVRL1) gene.
  modified_base (6): a, t, c or g
  modified_base (27): a, t, c or g
  modified_base (36): a, t, c or g
  modified_base (40): a, t, c or g
  modified_base (62): a, t, c or g
  modified_base (64): a, t, c or g
  modified_base (284): a, t, c or g
  modified_base (293): a, t, c or g
  modified_base (307): a, t, c or g
cgcggntggaggggaggtggccccggntccgccgangaantcgccccgccacccgcagagcncncagagggaccattgaccttgggctcccccaggaaaggccttctgatgctgctgatggccttggtgacccagggagaccctgtgaagccgtctcggggcccgctggtgacctgcacgtgtgagagcccacattgcaaggggcctacctgccggggggcctgggtgcacagtagtgcttgggtgcgggaggaggggaggcacccccagggaacattcggggntgcgggaantttgcacagggagntcttgcagggggggcgccccaccgatttcgttcaacc

SEQ ID NO: 160 - DNA, 416 bp, Homo sapiens
  5' terminal sequence. activin a receptor type ii-like 1 (ACVRL1) gene.
  modified_base (136): a, t, c or g
  modified_base (312): a, t, c or g
  modified_base (366): a, t, c or g
  modified_base (375): a, t, c or g
  modified_base (383): a, t, c or g
  modified_base (403): a, t, c or g
gtcagtctcccggaaccaggactgttcatccctcgaggagaagatcttgacggccacactctcaccgtgccacaagccccgccacacttcgccatagcgccttttcccacacactccaccaaggcaacctgccgtngccactgtcctctgcaccagggaaggggagccctgagccactccctgtgggtggcagtcactgtccagggaggtcccccaacatgctgttcgccctgcttcagatgcttttcagggatgaggatgggattttcccagcttcgctgttgcagggccacgttgctttttccttgcctncgttcgggacatggccacagggcccaggggacaaccagggggccaccagggggnccaggcaanggccaagncacggggggcccagggtttnaaggggccagttt

SEQ ID NO: 161 - DNA, 1970 bp, Homo sapiens
  activin a receptor type ii-like 1 (ACVRL1) gene.
aggaaacggtttattaggagggagtggtggagctgggccaggcaggaagacgctggaataagaaacatttttgctccagcccccatcccagtcccgggaggctgccgcgccagctgcgccgagcgagcccctccccggctccagcccggtccggggccgcgccggaccccagcccgccgtccagcgctggcggtgcaactgcggccgcgcggtggaggggaggtggccccggtccgccgaaggctagcgccccgccacccgcagagcgggcccagagggaccatgaccttgggctcccccaggaaaggccttctgatgctgctgatggccttggtgacccagggagaccctgtgaagccgtctcggggcccgctggtgacctgcacgtgtgagagcccacattgcaaggggcctacctgccggggggcctggtgcacagtagtgctggtgcgggaggaggggaggcacccccaggaacatcggggctgcgggaacttgcacagggagctctgcagggggcgccccaccgagttcgtcaaccactactgctgcgacagccacctctgcaaccacaacgtgtccctggtgctggaggccacccaacctccttcggagcagccgggaacagatggccagctggccctgatcctgggccccgtgctggccttgctggccctggtggccctgggtgtcctgggcctgtggcatgtccgacggaggcaggagaagcagcgtggcctgcacagcgagctgggagagtccagtctcatcctgaaagcatctgagcagggcgacacgatgttgggggacctcctggacagtgactgcaccacagggagtggctcagggctccccttcctggtgcagaggacagtggcacggcaggttgccttggtggagtgtgtgggaaaaggccgctatggcgaagtgtggcggggcttgtggcacggtgagagtgtggccgtcaagatcttctcctcgagggatgaacagtcctggttccgggagactgagatctataacacagtattgctcagacacgacaacatcctaggcttcatcgcctcagacatgacctcccgcaactcgagcacgcagctgtggctcatcacgcactaccacgagcacggctccctctacgactttctgcagagacagacgctggagccccatctggctctgaggctagctgtgtccgcggcatgcggcctggcgcacctgcacgtggagatcttcggtacacagggcaaaccagccattgcccaccgcgacttcaagagccgcaatgtgctggtcaagagcaacctgcagtgttgcatcgccgacctgggcctggctgtgatgcactcacagggcagcgattacctggacatcggcaacaacccgagagtgggcaccaagcggtacatggcacccgaggtgctggacgagcagatccgcacggactgctttgagtcctacaagtggactgacatctgggcctttggcctggtgctgtgggagattgcccgccggaccatcgtgaatggcatcgtggaggactatagaccacccttctatgatgtggtgcccaatgaccccagctttgaggacatgaagaaggtggtgtgtgtggatcagcagacccccaccatccctaaccggctggctgcagacccggtcctctcaggcctagctcagatgatgcgggagtgctggtacccaaacccctctgcccgactcaccgcgctgcggatcaagaagacactacaaaaaattagcaacagtccagagaagcctaaagtgattcaatagcccaggagcacctgattcctttctgcctgcagggggctgggggggtggggggcagtggatggtgccctatctgggtagaggtagtgtgagtgtggtgtgtgctggggatgggcagctgcgcctgcctgctcggcccccagcccacccagccaaaaatacagctgggctgaaacctg

SEQ ID NO: 162 - DNA, 407 bp, Homo sapiens
  5' terminal sequence. lim domain protein (RIL) gene.
  modified_base (42): a, t, c or g
  modified_base (49): a, t, c or g
  modified_base (105): a, t, c or g
  modified_base (150): a, t, c or g
  modified_base (179): a, t, c or g
  modified_base (301): a, t, c or g
  modified_base (373): a, t, c or g
  modified_base (380): a, t, c or g
  modified_base (385): a, t, c or g
  modified_base (397): a, t, c or g
gtgaccctgcgcgggccttcgccctggggcttccgcctggtngggccgnggacttcagcgcgcccctcaccatctcacgggtccatgctggcagcaaggctcatntggctgccctgtgcccaggagacctgatccaggccatcaatggtnagagcacagagctcatgacacacctggangcacagaaccgcatcaagggctgccacgatcacctcacactgtctgtgagcaggcctgagggcaggagctggcccagtgcccctgatgacagcaaggctcaggcacacaggatccacatcgntcctgagatccaggacggcagcccaacaaccagcaggcggccctcaggcaccgggacttgggccagaagatnggcagancaagnctggggtttttncatatggaca

SEQ ID NO: 163 - DNA, 1130 bp, Homo sapiens
  lim domain protein (RIL) gene.
tgagagtccggctcaggctccggctgcggctccagcccgcgatgccccattccgtgaccctgcgcgggccttcgccctggggcttccgcctggtgggccgggacttcagcgcgcccctcaccatctcacgggtccatgctggcagcaaggcctcattggctgccctgtgcccaggagacctgatccaggccatcaatggtgagagcacagagctcatgacacacctggaggcacagaaccgcatcaagggctgccacgatcacctcacactgtctgtgagcaggcctgagggcaggagctggcccagtgcccctgatgacagcaaggctcaggcacacaggatccacatcgatcctgagatccaggacggcagcccaacaaccagcaggcggccctcaggcaccgggactgggccagaagatggcagaccaagcctgggatctccatatggaaaacccccttgctttccagtccctcacaatggcagcagcgaggccaccctgccagcccagatgagcaccctgcatgtgtctccaccccccagcgctgacccagcagaggcctcccgcggagccgggagcagagtcgacctgggctccgaggtgtacaggatgctgcgggagccggccgagcccgtggccgcggagcccaagcagtcaggctccttccgctacttgcagggcatgctagaggccggcgagggcggggattggcccgggcctggcggcccccggaacctcaagcccacggccagcaagctgggcgctccgctgagcggcctgcaggggctgcccgagtgcacgcgctgctgccacggaatcgtgggcaccatcgtcaaggaacgggacaagctctaccatcccgagtgcttcatgtgcagtgactgcggcctgaacctcaagcagcgtggttacttctttctggacgagcggctctactgtgagagccacgccaaggcgcgcgtgaagccgcccgagggctacgacgtggtggcggtgtaccccaatgccaaggtggaactcgtctgagctgggaccctgctcccacccctgcttcttaaggtccctgctcggccggtgtaaatatgtttcaccctgtccctctaataaagctcctctgctcaaaaaaaa

SEQ ID NO: 164 - DNA, 310 bp, Homo sapiens
  5' terminal sequence. shc (src homology 2 domain-containing) transforming protein 1 (SHC1) gene.
  modified_base (2): a, t, c or g
  modified_base (184): a, t, c or g
  modified_base (275): a, t, c or g
  modified_base (299): a, t, c or g
anattcggaacgagggatccctcctatgtcaacgtccagaacctagacaaggcccggcaagcagtgggtggtgctgggccccccaatcctgctatcaatggcagtgcaccccgggacctgtttgacatgaagcccttcgaagatgctcttcgcgtgcctccacctccccagtcggtgtccatgnctgagcagctccgaggggagccctgggttccatgggaagctgagccggcgggaggctgaggcactgctggcagcttcaatggggatttccnggtacgggagagcacgaccacacnggggcaatatg

SEQ ID NO: 165 - DNA, 3664 bp, Homo sapiens
  shc (src homology 2 domain-containing) transforming protein 1 (SHC1) gene.
atggggcctgaaactgtctgggtctgagctggggagcggaagccacttgtccctctccctccccaggacttctgtgactcctgggccacagaggtccaaccagggtaagggcctggggataccccctgcctggcccccttgcccaaactggcaggggggccaggctgggcagcagcccctctttcacctcaactatggatctcctgccccccaagcccaagtacaatccactccggaatgagtctctgtcatcgctggaggaaggggcttctgggtccacccccccggaggagctgccttccccatcagcttcatccctggggcccatcctgcctcctctgcctggggacgatagtcccactaccctgtgctccttcttcccccggatgagcaacctgaggctggccaacccggctggggggcgcccagggtctaagggggagccaggaagggcagctgatgatggggaggggatcgatggggcagccatgccagagtcaggccccctacccctcctccaggacatgaacaagctgagtggaggcggcgggcgcaggactcgggtggaagggggccagcttgggggcgaggagtggacccgccacgggagctttgtcaataagcccacgcggggctggctgcatcccaacgacaaagtcatgggacccggggtttcctacttggttcggtacatgggttgtgtggaggtcctccagtcaatgcgtgccctggacttcaacacccggactcaggtcaccagggaggccatcagtctggtgtgtgaggctgtgccgggtgctaagggggcgacaaggaggagaaagccctgtagccgcccgctcagctctatcctggggaggagtaacctgaaatttgctggaatgccaatcactctcaccgtctccaccagcagcctcaacctcatggccgcagactgcaaacagatcatcgccaaccaccacatgcaatctatctcatttgcatccggcggggatccggacacagccgagtatgtcgcctatgttgccaaagaccctgtgaatcagagagcctgccacattctggagtgtcccgaagggcttgcccaggatgtcatcagcaccattggccaggccttcgagttgcgcttcaaacaatacctcaggaacccacccaaactggtcacccctcatgacaggatggctggctttgatggctcagcatgggatgaggaggaggaagagccacctgaccatcagtactataatgacttcccggggaaggaaccccccttggggggggtggtagacatgaggcttcgggaaggagccgctccaggggctgctcgacccactgcacccaatgcccagacccccagccacttgggagctacattgcctgtaggacagcctgttgggggagatccagaagtccgcaaacagatgccacctccaccaccctgtccaggcagagagctttttgatgatccctcctatgtcaacgtccagaacctagacaaggcccggcaagcagtgggtggtgctgggccccccaatcctgctatcaatggcagtgcaccccgggacctgtttgacatgaagcccttcgaagatgctcttcgggtgcctccacctccccagtcggtgtccatggctgagcagctccgaggggagccctggttccatgggaagctgagccggcgggaggctgaggcactgctgcagctcaatggggacttcttggtacgggagagcacgaccacacctggccagtatgtgctcactggcttgcagagtgggcagcctaagcatttgctactggtggaccctgagggtgtggttcggactaaggatcaccgctttgaaagtgtcagtcaccttatcagctaccacatggacaatcacttgcccatcatctctgcgggcagcgaactgtgtctacagcaacctgtggagcggaaactgtgatctgccctagcgctctcttccagaagatgccctccaatcctttccaccctattccctaactctcgggacctcgtttgggagtgttctgtgggcttggccttgtgtcagagctgggagtagcatggactctgggtttcatatccagctgagtgagagggtttgagtcaaaagcctgggtgagaatcctgcctctccccaaacattaatcaccaaagtattaatgtacagagtggcccctcacctgggcctttcctgtgccaacctgatgccccttccccaagaaggtgagtgcttgtcatggaaaatgtcctgtggtgacaggcccagtggaacagtcacccttctgggcaagggggaacaaatcacacctctgggcttcagggtatcccagacccctctcaacacccgccccccccatgtttaaactttgtgcctttgaccatctcttaggtctaatgatattttatgcaaacagttcttggacccctgaattcttcaatgacagggatgccaacaccttcttggcttctgggacctgtgttcttgctgagcaccctctccggtttgggttgggataacagaggcaggagtggcagctgtcccctctccctggggatatgcaacccttagagattgccccagagccccactcccggccaggcgggagatggacccctcccttgctcagtgcctcctggccggggcccctcaccccaaggggtctgtatatacatttcataaggcctgccctcccatgttgcatgcctatgtactctgcgccaaagtgcagcccttcctcctgaagcctctgccctgcctccctttctgggagggcggggtgggggtgactgaatttgggcctcttgtacagttaactctcccaggtggattttgtggaggtgagaaaaggggcattgagactataaagcagtagacaatccccacataccatctgtagagttggaactgcattcttttaaagttttatatgcatatattttagggctgctagacttactttcctattttcttttccattgcttattcttgagcacaaaatgataatcaattattacatttatacatcacctttttgacttttccaagcccttttacagctcttggcattttcctcgcctaggcctgtgaggtaactgggatcgcaccttttataccagagacctgaggcagatgaaatttatttccatctaggactagaaaaacttgggtctcttaccgcgagactgagaggcagaagtcagcccgaatgcctgtcagtttcatggaggggaaacgcaaaacctgcagttcctgagtaccttctacaggcccggcccagcctaggcccggggtggccacaccacagcaagccggccccccctcttttggccttgtggataagggagagttgaccgttttcatcctggcctccttttgctgtttggatgtttccacgggtctcacttataccaaagggaaaactcttcattaaagtccgtatttcttctaaaaaaaaaaaaaaaaaaatacatttatacatcacctttttgacttttccaagcccttttacagctcttggcattttcctcgcctaggcctgtgaggtaactgggatcgcaccttttataccagagacctgaggcagatgaaatttatttccatctaggactagaaaaacttgggtctcttaccgcgagactgagaggcagaagtcagcc

SEQ ID NO: 166 - DNA, 449 bp, Homo sapiens
  3' terminal sequence. glyceraldehyde-3-phosphate dehydrogenase (GAPD) gene.
  modified_base (12): a, t, c or g
  modified_base (122): a, t, c or g
  modified_base (317): a, t, c or g
  modified_base (333): a, t, c or g
  modified_base (345): a, t, c or g
  modified_base (437): a, t, c or g
  modified_base (445): a, t, c or g
gagcacagggtnctttattgatggtacatgacaaggtgcggctccctaggcccctcccctcttcaaggggtctacatggaaactgtgaggaggggagattcagtgtggtgggggactgagtntggcagggactccccagcagtgagggtctctctcttcctcttgtgctcttgctggggctggtggtccaggggtcttactccttggaggccatgtgggcatgaggtccaccaccctgttgctgtagccaaattcgttgtcataccagggaaatgagcttgacaaagtggtcgttgagggcaatgccagccccagcnttcgaaggtggaggantgggtttcgctnttgaagtcagaggagaccacctgggtgctcagtttagcccagggatgcccttgagggggccctccgacgtttttttcaccacctttttgatntcatcatntttt

SEQ ID NO: 167 - DNA, 467 bp, Homo sapiens
  5' terminal sequence. glyceraldehyde-3-phosphate dehydrogenase (GAPD) gene.
  modified_base (420): a, t, c or g
  modified_base (440): a, t, c or g
tgttcgacagtcagccgcatcttcttttgcgtcgccagccgagccacatcgctgagacaccatggggaaggtgaaggtcggagtcaacggatttggtcgtattgggcgcctggtcaccagggctgcttttaactctggtaaagtggatattgttgccatcaatgaccccttcattgacctcaactacatggtttacatgttccaatatgattccacccatgggcaaattccatgggcaccgtcaaggctgagaacgggaagcttgtcatcaatgggaaatcccattcaccatcttccagggagcgagatccctccaaaattcaagtggggggcgatgctgggcgcttgagttacgttcgtgggagttccactgggccttctttcaaccacccttggagaagggtttgggggttcattttncaaggggggggagcccaaangggtcttcattttttggcccccttttt

SEQ ID NO: 168 - DNA, 316 bp, Homo sapiens
  3' terminal sequence. desmin (DES) gene.
  modified_base (12): a, t, c or g
  modified_base (15): a, t, c or g
  modified_base (161): a, t, c or g
  modified_base (285): a, t, c or g
  modified_base (309): a, t, c or g
ggcttgtgtttnttntctctttattgtttctctccagagcccctgcagcaggggaggggagggcgtggggaggtgggcgcccctcccaccagcctgagaccgctctctgcctctctcctctcctctcttctccagcatctcacccactttctctccttctnaatctcctgctcccacctccagcaccttcggggattccctcttgtagcccctgctttctaagtccacccggggctggggaaaggaaagtaagagaccacggggacaatttcaagccccccagtntccacaggggctagtcccctgggntacctgc

SEQ ID NO: 169 - DNA, 440 bp, Homo sapiens
  5' terminal sequence. desmin (DES) gene.
  modified_base (383): a, t, c or g
atctccccatccagacctactctgccctcaacttccgagaaaccagccctgagcaaaggggttctgaggtccataccaagaagacggtgatgatcaagaccatcgagacacgggatggggaggtcgtcagtgaggccacacagcagcagcatgaagtgctctaaagacagagaccctctgccaccagagaccgtcctcacccctgtcctcactgctccctgaagccagccttcttccatcccagggacaccacacccagccttcagtcctccccttcacagcctctggacccctcctcactgggccattccctcgtggttccccaacagcggacataggcccatccttgctgggttcacaggggcatggccccgggccacttnttgcgggaaccccagttgttgaggctttggttgtttgggcagttgagttgaggcttt

SEQ ID NO: 170 - DNA, 2218 bp, Homo sapiens
  desmin (DES) gene.
cctcgccgcatccactctccggccggccgcctgcccgccgcctcctccgtgcgcccgccagcctcgcccgcgccgtcaccatgagccaggcctactcgtccagccagcgcgtgtcctcctaccgccgcaccttcggcggcgccccgggcttcccgctcggctccccgctgagctcgcccgtgttcccgcgggcgggtttcggctctaagggctcctccagctcggtgacgtcccgcgtgtaccaggtgtcgcgcacgtcgggcggggccgggggcctggggtcgctgcgggccagccggctggggaccacccgcacgccctcctcctacggcgcaggcgagctgctggacttctcactggccgacgcggtgaaccaggagtttctgaccacgcgcaccaacgagaaggtggagctgcaggagctcaatgaccgcttcgccaactacatcgagaaggtgcgcttcctggagcagcagaacgcgctcgccgccgaagtgaaccggctcaagggccgcgagccgacgcgagtggccgagctctacgaggaggagctgcgggagctgcggcgccaggtggaggtgctcactaaccagcgcgcgcgcgtcgacgtcgagcgcgacaacctgctcgacgacctgcagcggctcaaggccaagctgcaggaggagattcagttgaaggaagaagcagagaacaatttggctgccttccgagcggacgtggatgcagctactctagctcgcattgacctggagcgcagaattgaatctctcaacgaggagatcgcgttccttaagaaagtgcatgaagaggagatccgtgagttgcaggctcagcttcaggaacagcaggtccaggtggagatggacatgtctaagccagacctcactgccgccctcagggatatccgggctcagtatgagaccatcgcggctaagaacatttctgaagctgaggagtggtacaagtcgaaggtgtcagacctgacccaggcagccaacaagaacaacgacgccctgcgccaggccaagcaggagatgatggaataccgacaccagatccagtcctacacctgcgagattgacgccctcaagggcactaacgattccctgatgaggcagatgcgggaattggaggaccgatttgccagtgaggccagtggctaccaggacaacattgcgcgcctggaggaagaaatccggcacctcaaggatgagatggcccgccatctgcgcgagtaccaggacctgctcaacgtgaagatggccctggatgtggagattgccacctaccggaagctgctggagggagaggagagccggatcaatctccccatccagacctactctgccctcaacttccgagaaaccagccctgagcaaaggggttctgaggtccataccaagaagacggtgatgatcaagaccatcgagacacgggatggggaggtcgtcagtgaggcgacacagcagcagcatgaagtgctctaaagacgagagaccctctgccaccagagaccgtcctcacccctgtcctcactgctccctgaagcccagccttcttccatcccaggacaccacacccagcctcagtcctcccgtcacagcctctgacccctcctcactggccatccctcgtggtccccaacagcgacatagcccatccctgcctggtcacaggcatgccccggccacctctgcggaccccagctgtgagccttggctgttggcagtgagtgagcctggctcttgtgctggatggagcccaggcgggagcggtggccctgtccctcccacctctgtgacctgaggcctacgctttggctctggagatagccccagagcagggtgttgggatactgcagggccaggactgagccccgcagacctccccagcccctagcccaggagagagaaagccaggcaggtagcctgggggactagccctgtggagactggggggcttgaaattgtccccgtggtctcttactttcctttccccagcccagggtggacttagaaagcaggggctacaagagggaatccccgaaggtgctggaggtgggagcaggagattgagaaggagagaaagtgggtgagatgctggagaagagagaggaggagagaggcagagagcggtctgaggctggtgggaggggcgcccacctccccacgccctccccccccctgctgcaggggctctggagagaaacaataaa

SEQ ID NO: 171 - DNA, 367 bp, Homo sapiens
  5' terminal sequence. casein kinase 2, beta polypeptide (CSNK2B) gene.
  modified_base (342): a, t, c or g
gatccacgcccgctacatccttaccaaccgtggcatcgccagatgttggaaaagtaccagcaaggagactttggttactgtcctcgtgtgtactgtgagaaccagccaatgcttcccattggcctttcagacatcccaggtgaagccatggtgaagctctactgccccaagtgcatggatgtgtacacacccaagtcatcaagacaccatcacacggatgggcgcctactttcggcactggtttccctcacatgctcttcatgggtgcatcccgagtaccggcccaaggggaccttgccaaccagtttgtgcccagggttttacggttttcaaggttccatncggtggggcttaccaggttgcaggt

SEQ ID NO: 172 - DNA, 1128 bp, Homo sapiens
  casein kinase 2, beta polypeptide (CSNK2B) gene.
gcttctcgttgtgccccgcccgcaagcgccctcctccgggccttcgtgacagccaggtcgtgcgcgggtcatcctgggattggtagttcgctttctctcatttagccagtttctttctctaccggggactccgtgtcccggcatccaccgcggcacctgacccttggcgcttgcgtgttgccctcttccccaccctccctaatttccactccccccaccccacttcgcctgccgcggtcgggtccgcggcctgcgctgtagcggtcgccgccgttccctggaagtagcaacttccctaccccaccccagtcctggtccccgtccagccgctgacgtgaagatgagcagctcagaggaggtgtcctggatttcctggttctgtgggctccgtggcaatgaattcttctgtgaagtggatgaagactacatccaggacaaatttaatcttactggactcaatgagcaggtccctcactatcgacaagctctagacatgatcttggacctggagcctgatgaagaactggaagacaaccccaaccagagtgacctgattgagcaggcagccgagatgctttatggattgatccacgcccgctacatccttaccaaccgtggcatcgcccagatgttggaaaagtaccagcaaggagactttggttactgtcctcgtgtgtactgtgagaaccagccaatgcttcccattggcctttcagacatcccaggtgaagccatggtgaagctctactgccccaagtgcatggatgtgtacacacccaagtcatcaagacaccatcacacggatggcgcctacttcggcactggtttccctcacatgctcttcatggtgcatcccgagtaccggcccaagagacctgccaaccagtttgtgcccaggctctacggtttcaagatccatccgatggcctaccagctgcagctccaagccgccagcaacttcaagagcccagtcaagacgattcgctgattccctcccccacctgtcctgcagtctttgtcttttcctttcttttttgccaccctttcaggaaccctgtatggtttttagtttaaattaaaggagtcgttatcgtggtgggaatatgaaataaagtagaagaaaaggcc

SEQ ID NO: 173 - DNA, 475 bp, Homo sapiens
  3' terminal sequence. golgi apparatus protein 1 (GLG1) gene.
  modified_base (13): a, t, c or g
  modified_base (42): a, t, c or g
  modified_base (76): a, t, c or g
  modified_base (103): a, t, c or g
  modified_base (251): a, t, c or g
  modified_base (275): a, t, c or g
  modified_base (285): a, t, c or g
  modified_base (301): a, t, c or g
  modified_base (340): a, t, c or g
  modified_base (367): a, t, c or g
  modified_base (377): a, t, c or g
  modified_base (382): a, t, c or g
  modified_base (387): a, t, c or g
  modified_base (403): a, t, c or g
  modified_base (423): a, t, c or g
  modified_base (429): a, t, c or g
  modified_base (446): a, t, c or g
gggtttttttctnaaaaaaacctttgagttgcaggtcaggtnagttggttctggaagtaccggaagttctgttggnatgagagagacttgtctacaggcaggnaaacccaagtttgccaaacaaaggcagtaaccccagcgaccagctgctgctgctgcacggtgaggaggaggaggacaccatggacacgagtggaggctggatgggacaacgcagtggacatctgctaatgctctaacacggggttggngtcacttctgagaagagcgaggtnagtggggatnctatacaagagggctntacaaactggggcactgggatagggtagttcctttgggngggtcaaggtgggctctaccccgtccnttgagctctngtgtncactncgcttgggggatcccntcccacacattcagggccantcaggnacaattttaccaggtgntcccactgtttcacagggggatttaagtt

SEQ ID NO: 174 - DNA, 483 bp, Homo sapiens
  5' terminal sequence. golgi apparatus protein 1 (GLG1) gene.
  modified_base (246): a, t, c or g
  modified_base (385): a, t, c or g
ggtcatctcttgcctgaagctgagatatgctgaccagcgcctgtcttcagactgtgaagaccagatccgaatcattatccaggagtccgccctggactaccgcctggatcctcagctccagctgcactgctcagacgagatctccagtctatgtgctgaagaagcagcagcccaagagcagacaggtcaggtggaggagtgcctcaaggtcaacctgctcaagatcaaaacagaattgtgtaaatnggaagtgctaaacatgctgaaggaaagcaaagcagacatctttgttgacccggtacttcatacttgcttgtgccctgggacattaaacaccactgcgcagcattcaccctgggccgcgggcgttcaaattgttcctgtnttcatgggaaggcactgggagggttaaggcgggttgaggtttacagcccgagttgcaaaaaggcgcttcattgacccggtttgaggtgttggattttt

SEQ ID NO: 175 - DNA, 3909 bp, Homo sapiens
  golgi apparatus protein 1 (GLG1) gene.
ggcacgaggctcgccgcggactcaagatggcggcgtgtggacgtgtacggaggatgttccgcttgtcggcggcgctgcatctgctgctgctattcgcggccgggggcagaaactccccggccagggcgtcccacagccagggccagggtcccggggccaactttgtgtccttcgtagggcaggccggaggcggcggcccggcgggtcagcagctgccccagctgcctcagtcatcgcagcttcagcagcaacagcagcagcagcaacagcaacagcagcctcagccgccgcagccgcctttcccggcgggtgggcctccgcggcggggaggagcgggggctggtgggggctggaagctggcggaggaagagtcctgcagggaggacgtgacccgcgtgtgccctaagcacacctggagcaacaacctggcggtgctcgagtgcctgcaggatgtgagggagcctgaaaatgaaatttcttcagactgcaatcatttgttgtggaattataagctgaacctaactacagatcccaaatttgaatctgtggccagagaggtttgcaaatctactataacagagattaaagaatgtgctgatgaaccggttggaaaaggttacatggtttcctgcttagtggatcaccgaggcaacatcactgagtatcagtgtcaccagtacattaccaagatgacggccatcatttttagtgattaccgtttaatctgtggcttcatggatgactgcaaaaatgacatcaacattctgaaatgtggcagtattcggcttggagaaaaggatgcacattcacaaggtgaggtggtatcatgcttggagaaaggcctggtgaaagaagcagaagaaagagaacccaagattcaagtttctgaactctgcaagaaagccattctccgggtggctgagctgtcatcggatgactttcacttagaccggcatttatattttgcttgccgagatgatcgggagcgtttttgtgaaaatacacaagctggtgagggcagagtgtataagtgcctctttaaccataaatttgaagaatccatgagtgaaaagtgtcgagaagcacttacaacccgccaaaagctgattgcccaggattataaagtcagttattcattggccaaatcctgtaaaagtgacttgaagaaataccggtgcaatgtggaaaaccttccgcgatcgcgtgaagccaggctctcctacttgttaatgtgcctggagtcagctgtacacagagggcgacaagtcagcagtgagtgccagggggagatgctggattaccgacgcatgttgatggaagacttttctctgagccctgagatcatcctaagctgtcggggggagattgaacaccattgttccggattacatcgaaaaggacggaccctacactgtctgatgaaggtagttcgaggggagaaggggaaccttggaatgaactgccagcaggcgcttcaaacactgattcaggagactgaccctggtgcagattaccgcattgatcgagctttgaatgaagcttgtgaatctgtaatccagacagcctgcaaacatataagatctggagacccaatgatctcgtcgtgcctgatggaacatttatacacagagaagatggtagaagactgtgaacaccgtctcttagagctgcagtatttcatctcccgggattggaagctggaccctgtcctgtaccgcaagtgccagggagacgcttctcgtctttgccacacccacggttggaatgagaccagtgaatttatgcctcagggagctgtgttctcttgtttatacagacacgcctaccgcactgaagaacagggaaggaggctctcacgggagtgccgagctgaagtccaaaggatcctacaccagcgtgccatggatgtcaagctggatcctgccctccaggataagtgcctgattgatctgggaaaatggtgcagtgagaaaacagagactggacaggagctggagtgccttcaggaccatctggatgacttggtggtggagtgtagagatatagttggcaacctcactgagttagaatcagaggatatccaaatagaagccttgctgatgagagcctgtgagcccataattcagacattctgccacgatgcggataaccagatagactctggggacctgatggagtgtctgatacagaacaaacaccagaaggacatgaacgagaagtgtgccatcggagttacccacttccagctggtgcagatgaaggattttcggttttcttacaagtttaaaatggcctgcaaggaggacgtgttgaagctttgcccaaacataaaaaagaaggtggacgtggtgatctgcctgagcacgaccgtgcgcaatgacactctgcaggaagccaaggagcacagggtgtccctgaagtgccgcaggcagctccgtgtggaggagctggagatgacggaggacatccgcttggagccagatctatacgaagcctgcaagagtgacatcaaaaacttctgttccgctgtgcaatatggcaacgctcagattatcgaatgtctgaaagaaaacaagaagcagctaagcacccgctgccaccaaaaagtatttaagctgcaggagacagagatgatggacccagagctagactacaccctcatgagggtctgcaagcagatgataaagaggttctgtccggaagcagattctaaaaccatgttgcagtgcttgaagcaaaataaaaacagtgaattgatggatcccaaatgcaaacagatgataaccaagcgccagatcacccagaacacagattaccgcttaaaccccatgttaagaaaagcctgtaaagctgacattcctaaattctgtcacggtatcctgactaaggccaaggatgattcagaattagaaggacaagtcatctcttgcctgaagctgagatatgctgaccagcgcctgtcttcagactgtgaagaccagatccgaatcattatccaggagtccgccctggactaccgcctggatcctcagctccagctgcactgctcagacgagatctccagtctatgtgctgaagaagcagcagcccaagagcagacaggtcaggtggaggagtgcctcaaggtcaacctgctcaagatcaaaacagaattgtgtaaaaaggaagtgctaaacatgctgaaggaaagcaaagcagacatctttgttgacccggtacttcatactgcttgtgccctggacattaaacaccactgcgcagcactcacccctggccgcgggcgtcaaatgtcctgtctcatggaagcactggaggataagcgggtgaggttacagcccgagtgcaaaaagcgcctcaatgaccggattgagatgtggagttacgcagcaaaggtggccccagcagatggcttctctgatcttgccatgcaagtaatgacgtctccatctaagaactacattctctctgtgatcagtgggagcatctgtatattgttcctgattggcctgatgtgtggacggatcaccaagcgagtgacacgagagctcaaggacaggtagagccaccttgaccaccaaaggaactacctatccagtgcccagtttgtacagccctcttgtatagcatccccactcacctcgctcttctcagaagtgacaccaaccccgtgttagagcattagcagatgtccactgcgttgtcccatccagcctccactcgtgtccatggtgtcctcctcctcctcaccgtgcagcagcagcagctggtcgctggggttactgcctttgtttggcaaacttgggtttacctgcctgtagacaagtctctctcataccaacagaacttccggtacttccagaaccaactcacctgacctgcaactcaaaggcttttttaagaaaaccacca

SEQ ID NO: 176 - DNA, 390 bp, Homo sapiens
  5' terminal sequence. endothelin receptor type b (EDNRB) gene.
gttaagatcaaacctcacaaagagaaatagaatgtttgaaaggctatcccaaaagacttttttgaatctgtcattcacataccctgtgaagacaatactatctacaattttttcaggattattaaaatcttcttctttcactatcgtagcttaaactctgtttggttttgtcatctgtaaatacttacctacatacactgcatgtagatgattaaatgagggcaggccctgtgctcatagctttacgatggagagatgccagtgacctcataataaagactgtggaactgcctgggtgcagtgtccacatgacaaaggggcaggtaggcaccctctcttcacccatgctgtgggttaaatgggtttctaggcatatgtattatggctatt

SEQ ID NO: 177 - DNA, 4286 bp, Homo sapiens
  endothelin receptor type b (EDNRB) gene.
gagacattccggtgggggactctggccagcccgagcaacgtggatcctgagagcactcccaggtaggcatttgccccggtgggacgccttgccagagcagtgtgtggcaggcccccgtggaggatcaacacagtggctgaacactgggaaggaactggtacttggagtctggacatctgaaacttggctctgaaactgcgcagcggccaccggacgccttctggagcaggtagcagcatgcagccgcctccaagtctgtgcggacgcgccctggttgcgctggttcttgcctgcggcctgtcgcggatctggggagaggagagaggcttcccgcctgacagggccactccgcttttgcaaaccgcagagataatgacgccacccactaagaccttatggcccaagggttccaacgccagtctggcgcggtcgttggcacctgcggaggtgcctaaaggagacaggacggcaggatctccgccacgcaccatctcccctcccccgtgccaaggacccatcgagatcaaggagactttcaaatacatcaacacggttgtgtcctgccttgtgttcgtgctggggatcatcgggaactccacacttctgagaattatctacaagaacaagtgcatgcgaaacggtcccaatatcttgatcgccagcttggctctgggagacctgctgcacatcgtcattgacatccctatcaatgtctacaagctgctggcagaggactggccatttggagctgagatgtgtaagctggtgcctttcatacagaaagcctccgtgggaatcactgtgctgagtctatgtgctctgagtattgacagatatcgagctgttgcttcttggagtagaattaaaggaattggggttccaaaatggacagcagtagaaattgttttgatttgggtggtctctgtggttctggctgtccctgaagccataggttttgatataattacgatggactacaaaggaagttatctgcgaatctgcttgcttcatcccgttcagaagacagctttcatgcagttttacaagacagcaaaagattggtggctgttcagtttctatttctgcttgccattggccatcactgcatttttttatacactaatgacctgtgaaatgttgagaaagaaaagtggcatgcagattgctttaaatgatcacctaaagcagagacgggaagtggccaaaaccgtcttttgcctggtccttgtctttgccctctgctggcttccccttcacctcagcaggattctgaagctcactctttataatcagaatgatcccaatagatgtgaacttttgagctttctgttggtattggactatattggtatcaacatggcttcactgaattcctgcattaacccaattgctctgtatttggtgagcaaaagattcaaaaactgctttaagtcatgcttatgctgctggtgccagtcatttgaagaaaaacagtccttggaggaaaagcagtcgtgcttaaagttcaaagctaatgatcacggatatgacaacttccgttccagtaataaatacagctcatcttgaaagaagaactattcactgtatttcattttctttatattggaccgaagtcattaaaacaaaatgaaacatttgccaaaacaaaacaaaaaactatgtatttgcacagcacactattaaaatattaagtgtaattattttaacactcacagctacatatgacattttatgagctgtttacggcatggaaagaaaatcagtgggaattaagaaagcctcgtcgtgaaagcacttaattttttacagttagcacttcaacatagctcttaacaacttccaggatattcacacaacacttaggcttaaaaatgagctcactcagaatttctattctttctaaaaagagatttatttttaaatcaatgggactctgatataaaggaagaataagtcactgtaaaacagaacttttaaatgaagcttaaattactcaatttaaaattttaaaatcctttaaaacaacttttcaattaatattatcacactattatcagattgtaattagatgcaaatgagagagcagtttagttgttgcatttttcggacactggaaacatttaaatgatcaggagggagtaacagaaagagcaaggctgtttttgaaaatcattacactttcactagaagcccaaacctcagcattctgcaatatgtaaccaacatgtcacaaacaagcagcatgtaacagactggcacatgtgccagctgaatttaaaatataatacttttaaaaagaaaattattacatcctttacattcagttaagatcaaacctcacaaagagaaatagaatgtttgaaaggctatcccaaaagacttttttgaatctgtcattcacataccctgtgaagacaatactatctacaattttttcaggattattaaaatcttcttttttcactatcgtagcttaaactctgtttggttttgtcatctgtaaatacttacctacatacactgcatgtagatgattaaatgagggcaggccctgtgctcatagctttacgatggagagatgccagtgacctcataataaagactgtgaactgcctggtgcagtgtccacatgacaaaggggcaggtagcaccctctctcacccatgctgtggttaaaatggtttctagcatatgtataatgctatagttaaaatactatttttcaaaatcatacagattagtacatttaacagctacctgtaaagcttattactaatttttgtattatttttgtaaatagccaatagaaaagtttgcttgacatggtgcttttctttcatctagaggcaaaactgctttttgagaccgtaagaacctcttagctttgtgcgttcctgcctaatttttatatcttctaagcaaagtgccttaggatagcttgggatgagatgtgtgtgaaagtatgtacaagagaaaacggaagagagaggaaatgaggtggggttggaggaaacccatggggacagattcccattcttagcctaacgttcgtcattgcctcgtcacatcaatgcaaaaggtcctgattttgttccagcaaaacacagtgcaatgttctcagagtgactttcgaaataaattgggcccaagagctttaactcggtcttaaaatatgcccaaatttttactttgtttttcttttaataggctgggccacatgttggaaataagctagtaatgttgttttctgtcaatattgaatgtgatggtacagtaaaccaaaacccaacaatgtggccagaaagaaagagcaataataattaattcacacaccatatggattctatttataaatcacccacaaacttgttctttaatttcatcccaatcactttttcagaggcctgttatcatagaagtcattttagactctcaattttaaattaattttgaatcactaatattttcacagtttattaatatatttaatttctatttaaattttagattatttttattaccatgtactgaatttttacatcctgataccctttccttctccatgtcagtatcatgttctctaattatcttgccaaattttgaaactacacacaaaaagcatacttgcattatttataataaaattgcattcagtggctttttaaaaaaaatgtttgattcaaaactttaacatactgataagtaagaaacaattataatttctttacatactcaaaaccaagatagaaaaaggtgctatcgttcaacttcaaaacatgtttcctagtattaaggactttaatatagcaacagacaaaattattgttaacatggatgttacagctcaaaagatttataaaagattttaacctattttctcccttattatccactgctaatgtggatgtatgttcaaacaccttttagtattgatagcttacatatggccaaaggaatacagtttatagcaaaacatgggtatgctgtagctaactttataaaagtgtaatataacaatgtaaaaaattatatatctgggaggattttttggttgcctaaagtggctatagttactgattttttattatgtaagcaaaaccaataaaaatttaagtttttttaacaactaccttatttttcactgtacagacactaattcattaaatactaattgattgtttaaaagaaatataaatgtgacaagtggacattatttatgttaaatatacaattatcaagcaagtatgaagttattcaattaaaatgccacatttctggtctctggg

SEQ ID NO: 178 - DNA, 462 bp, Homo sapiens
  3' terminal sequence. granzyme b (granzyme 2, cytotoxic t-lymphocyte-associated serine esterase 1) (GZMB) gene.
  modified_base (4): a, t, c or g
  modified_base (125): a, t, c or g
  modified_base (157): a, t, c or g
  modified_base (226): a, t, c or g
  modified_base (236): a, t, c or g
  modified_base (238): a, t, c or g
  modified_base (303): a, t, c or g
  modified_base (349): a, t, c or g
  modified_base (370): a, t, c or g
  modified_base (458): a, t, c or g
acancagagatccatttattacagtcctgcaaccccgactgcccaccccttgggaattcttgcctctgtcccagagatggtcaggcccagaggaaggttagtctcatgcctgctgttagaggcgnttcattgttctctttatccagggcaggaagtntgagaccttgatgtagactcctgggggtgtcccttttttgtttccataggagagaataccttgggctangtccttacanangaggggccccccggagttcccccttgaaaccggtctgtgtcttctttggatcccccacacaaatntcagtgggctctgctgtaattgccatgggaaggagacggttcacantgggcagttccttctgcactnttcaggaacaatttcctgaagtgtgggttgctaaagtgctcattgagaaataaccccaggccaggccaaattgaaaagttgcctgggntttt

SEQ ID NO: 179 - DNA, 960 bp, Homo sapiens
  granzyme b (granzyme 2, cytotoxic t-lymphocyte-associated serine esterase 1) (GZMB) gene.
agcagctccaaccagggcagccttcctgagaagatgcaaccaatcctgcttctgctggccttcctcctgctgcccagggcagatgcaggggagatcatcgggggacatgaggccaagccccactcccgcccctacatggcttatcttatgatctgggatcagaagtctctgaagaggtgcggtggcttcctgatacaagacgacttcgtgctgacagctgctcactgttggggaagctccataaatgtcaccttgggggcccacaatatcaaagaacaggagccgacccagcagtttatccctgtgaaaagacccatcccccatccagcctataatcctaagaacttctccaacgacatcatgctactgcagctggagagaaaggccaagcggaccagagctgtgcagcccctcaggctacctagcaacaaggcccaggtgaagccagggcagacatgcagtgtggccggctgggggcagacggcccccctgggaaaacactcacacacactacaagaggtgaagatgacagtgcaggaagatcgaaagtgcgaatctgacttacgccattattacgacagtaccattgagttgtgcgtgggggacccagagattaaaaagacttcctttaagggggactctggaggccctcttgtgtgtaacaaggtggcccagggcattgtctcctatggacgaaacaatggcatgcctccacgagcctgcaccaaagtctcaagctttgtacactggataaagaaaaccatgaaacgctactaactacaggaagcaaactaagcccccgctgtaatgaaacaccttctctggagccaagtccagatttacactgggagaggtgccagcaactgaataaatacctctcccagtgtaaatctggagccaagtccagatttacactgggagaggtgccagcaactgaataaatacctcttagctgagtgg

SEQ ID NO: 180 - DNA, 471 bp, Homo sapiens
  3' terminal sequence. fibroblast growth factor receptor 1 (fms-related tyrosine kinase 2, pfeiffer syndrome) (FGFR1) gene.
  modified_base (2): a, t, c or g
  modified_base (174): a, t, c or g
  modified_base (242): a, t, c or g
  modified_base (274): a, t, c or g
  modified_base (310): a, t, c or g
  modified_base (363): a, t, c or g
  modified_base (389): a, t, c or g
  modified_base (402): a, t, c or g
  modified_base (411): a, t, c or g
  modified_base (456): a, t, c or g
tnaagcagcagcaatttttattgagggacctaaactgaaaataggtttagaacataatttaaaaaaataaaacagcaaaagtagcaaaaaatatatgacctttttaaaaacattttccttttttttcttttttgtttttaatatatagcaactgatgcctcccagccaccaggngcatcttacccgatgggtaaatctctggtaacgacccttttaaaaagacatgtaaatatatactcagntttatacactttgtgttttcttcatagctatntacagagcccccagtttgggctgggccaggggccancaacactgcccccaacctgggccttcgcctcaccatcctctgggtaccgggcntttgggtcaggcaaagcaaactagtntcgggtttattangccactggnaccacctttttgggggcagaggtcaccttcattcgagggcacgangcactgacctccttt

SEQ ID NO: 181 - DNA, 463 bp, Homo sapiens
  5' terminal sequence. fibroblast growth factor receptor 1 (fms-related tyrosine kinase 2, pfeiffer syndrome) (FGFR1) gene.
  modified_base (74): a, t, c or g
  modified_base (177): a, t, c or g
  modified_base (374): a, t, c or g
  modified_base (459): a, t, c or g
gctttgctgccagccacttcatcccctcccagatgttggaccaacacccctccctgccaccaggactgcctgangggaggagtgggagccaatgaacaggcatgcaagtgagagcttcctgagctttctcctgtcggtttggtctgttttgccttcacccataagcccctcgcactntggtggcaggtgccttgtcctcagggctacagcagtagggaggtcagtgcttcgtgcctcgattgaaggtgacctctgccccagataggtggtgccagtggctttattaattccgatactagtttgctttgctgaccaaatgcctgggtaccagaggatggtgaggcgaaggcaggttgggggcagtgttgtggccnggggccagcccaaaactgggggcttctgtatatagctattgaagaaaacacaaatgtattaatctgagtatatattttacatgtntttt

SEQ ID NO: 182 - DNA, 4066 bp, Homo sapiens
  fibroblast growth factor receptor 1 (fms-related tyrosine kinase 2, pfeiffer syndrome) (FGFR1) gene.
cctcttgcggccacaggcgcggcgtcctcggcggcgggcggcagctagcgggagccgggacgccggtgcagccgcagcgcgcggaggaacccgggtgtgccgggagctgggcggccacgtccggacgggaccgagacccctcgtagcgcattgcggcgacctcgccttccccggccgcgagcgcgccgctgcttgaaaagccgcggaacccaaggacttttctccggtccgagctcggggcgccccgcaggcgcacggtacccgtgctgcagtcgggcacgccgcggcgccgggggcctccgcagggcgatggagccggtctgcaaggaaagtgaggcgccgccgctgcgttctggaggaggggggcacaaggtctggagaccccgggtggcggacgggagccctccccccgccccgcctccggggcaccagctccggctccattgttcccgcccgggctggaggcgccgagcaccgagcgccgccgggagtcgagcgccggccgcggagctcttgcgaccccgccaggacccgaacagagcccgggggcggcgggccggagccggggacgcgggcacacgcccgctcgcacaagccacggcggactctcccgaggcggaacctccacgccgagcgagggtcagtttgaaaaggaggatcgagctcactgtggagtatccatggagatgtggagccttgtcaccaacctctaactgcagaactgggatgtggagctggaagtgcctcctcttctgggctgtgctggtcacagccacactctgcaccgctaggccgtgcccgaccttgcctgaacaagcccagccctggggagcccctgtggaagtggagtccttcctggtccacccgggtgacctgctgcagttgcgctgtcggctgcgggacgatgtgcagagcatcaactggctgcgggacggggtgcagctggcggaaagcaaccgcacccgcatcacaggggaggaggtggaggtgcaggactccgtgcccgcagactccggcctctatgcttgcgtaaccagcagcccctcgggcagtgacaccacctacttctccgtcaatgtttcagatgctctcccctcctcggaggatgatgatgatgatgatgactcctcttcagaggagaaagaaacagataacaccaaaccaaaccgtatgcccgtagctccatattggacatccccagaaaagatggaaaagaaattgcatgcagtgccggctgccaagacagtgaagttcaaatgcccttccagtgggaccccaaaccccacactgcgctggttgaaaaatggcaaagaattcaaacctgaccacagaattggaggctacaaggtccgttatgccacctggagcatcataatggactctgtggtgccctctgacaagggcaactacacctgcattgtggagaatgagtacggcagcatcaaccacacataccagctggatgtcgtggagcggtcccctcaccggcccatcctgcaagcagggttgcccgccaacaaaacagtggccctgggtagcaacgtggagttcatgtgtaaggtgtacagtgacccgcagccgcacatccagtggctaaagcacatcgaggtgaatgggagcaagattggcccagacaacctgccttatgcccagatcttgaagactgctggagttaataccaccgacaaagagatggaggtgcttcacttaagaaatgtctcctttgaggacgcaggggagtatacgtgcttggcgggtaactctatcggactctcccatcactctgcatggttgaccgttctggaagccctggaagagaggccggcagtgatgacctcgcccctgtacctggagatcatcatctattgcacaggggccttcctcatctcctgcatggtggggtcggtcatcgtctacaagatgaagagtggtaccaagaagagtgacttccacagccagatggctgtgcacaagctggccaagagcatccctctgcgcagacaggtaacagtgtctgctgactccagtgcatccatgaactctggggttcttctggttcggccatcacggctctcctccagtgggactcccatgctagcaggggtctctgagtatgagcttcccgaagaccctcgctgggagctgcctcgggacagactggtcttaggcaaacccctgggagagggctgctttgggcaggtggtgttggcagaggctatcgggctggacaaggacaaacccaaccgtgtgaccaaagtggctgtgaagatgttgaagtcggacgcaacagagaaagacttgtcagacctgatctcagaaatggagatgatgaagatgatcgggaagcataagaatatcatcaacctgctgggggcctgcacgcaggatggtcccttgtatgtcatcgtggagtatgcctccaagggcaacctgcgggagtacctgcaggcccggaggcccccagggctggaatactgctacaaccccagccacaacccagaggagcagctctcctccaaggacctggtgtcctgcgcctaccaggtggcccgaggcatggagtatctggcctccaagaaggtgtggaacctgaaggctcccctggtgcatacaccgagacctggcagccaggaatgtcctggtgacagaggacaatgtgatgaagatagcagactttggcctcgcacgggacattcaccacatcgactactataaaaagacaaccaacggccgactgcctgtgaagtggatggcacccgaggcattatttgaccggatctacacccaccagagtgatgtgtggtctttcggggtgctcctgtgggagatcttcactctgggcggctccccataccccggtgtgcctgtggaggaacttttcaagctgctgaaggagggtcaccgcatggacaagcccagtaactgcaccaacgagctgtacatgatgatgcgggactgctggcatgcagtgccctcacagagacccaccttcaagcagctggtggaagacctggaccgcatcgtggccttgacctccaaccaggagtacctggacctgtccatgcccctggaccagtactcccccagctttcccgacacccggagctctacgtgctcctcaggggaggattcggtcttctctcatgagccgctgcccgaggagccctgcctgccccgacacccagcccagcttgccaatggcggactcaaacgccgctgactgccacccacacgccctccccagactccaccgtcagctgtaaccctcacccacagcctgctgggcccaccacctgtccgtccctgtcccctttcctgctggcaggagccggctgcctaccaggggccttcctgtgtggcctgccttcaccccactcagctcacctctccctccacctcctctccacctgctggtgagaggtgcaaagaggcagatctttgctgccagccacttcatcccctcccagatgttggaccaacacccctccctgccacaggcactgcctggagggcagggagtgggagccaatgaacaggcatgcaagtgagagctttctgagctttctcctgtcggtttggtctgttttgccttcacccataagcccctcgcactctggtggcaggtgcttgtcctcagggctacagcagtagggaggtcagtgcttcgtgcctcgattgaaggtgacctctgccccagataggtggtgccagtggcttattaattccgatactagtttgctttgctgaccaaatgcctggtaccagaggatggtgaggcgaaggccaggttgggggcagtgttgtgccctgtcccagcccaaactgggggctctgtatatagctatgaagaaaacacaaagtgtataaatctgagtatatatttacatgtctttttaaaagggtcgttaccagagatttacccatcgggtaagatgctcctggtggctgggaggcatcagttgctatatattaaaaacaaaaaagaaaaaaaaggaaaatgtttttaaaaaggtcatatattttttgctacttttgctgttttatttttttaaattatgttctaaac

SEQ ID NO: 183 - DNA, 415 bp, Homo sapiens
  5' terminal sequence. protein phosphatase 2 (formerly 2a), catalytic subunit, alpha isoform (PPP2CA) gene.
  modified_base (384): a, t, c or g
  modified_base (392): a, t, c or g
cagttatatccctccatcactagctggtgagctctagacaccaacgtgaggccattggattgattaaatgtctcagaaatatcttgcccaaaggtgtaaccagctcctcgaggagatataccccaaccaccacggtcatctggatctgaccacagcaagtcacacattggaccctcatggggaacttcttgtaggcgatcaagtgctctgatatgatccagtgtatctatagatggcgagagaccaccatgtagacagaagatctgcccatccaccaaggcagtgagaggaagatagtcaaaaagatctgtaaaatatttccaaacatttggcatttccatattttcttaaacattcattctaggaaaccttaaacttgtgtgnatctgtcnggtcttctggtttccctggagga

SEQ ID NO: 184 - DNA, 2181 bp, Homo sapiens
  protein phosphatase 2 (formerly 2a), catalytic subunit, alpha isoform (PPP2CA) gene.
agagagccgagctctggagcctcagcgagcggaggaggaggcgcagggccgacggccgagtactgcggtgagagccagcgggccagcgccagcctcaacagccgccagaagtacacgaggaaccggcggcggcgtgtgcgtgtaggcccgtgtgcgggcggcggcgcgggaggagcgcggagcggcagccggctggggcgggtggcatcatggacgagaaggtgttcaccaaggagctggaccagtggatcgagcagctgaacgagtgcaagcagctgtccgagtcccaggtcaagagcctctgcgagaaggctaaagaaatcctgacaaaagaatccaacgtgcaagaggttcgatgtccagttactgtctgtggagatgtgcatgggcaatttcatgatctcatggaactgtttagaattggtggcaaatcaccagatacaaattacttgtttatgggagattatgttgacagaggatattattcagttgaaacagttacactgcttgtagctcttaaggttcgttaccgtgaacgcatcaccattcttcgagggaatcatgagagcagacagatcacacaagtttatggtttctatgatgaatgtttaagaaaatatggaaatgcaaatgtttggaaatattttacagatctttttgactatcttcctctcactgccttggtggatgggcagatcttctgtctacatggtggtctctcgccatctatagatacactggatcatatcagagcacttgatcgcctacaagaagttccccatgagggtccaatgtgtgacttgctgtggtcagatccagatgaccgtggtggttggggtatatctcctcgaggagctggttacacctttgggcaagatatttctgagacatttaatcatgccaatggcctcacgttggtgtctagagctcaccagctagtgatggagggatataactggtgccatgaccggaatgtagtaacgattttcagtgctccaaactattgttatcgttgtggtaaccaagctgcaatcatggaacttgacgatactctaaaatactctttcttgcagtttgacccagcacctcgtagaggcgagccacatgttactcgtcgtaccccagactacttcctgtaatgaaattttaaacttgtacagtattgccatgaaccatatatcgacctaatggaaatgggaagagcaacagtaactccaaagtgtcagaaaatagttaacattcaaaaaacttgttttcacatggaccaaaagatgtgccatataaaaatacaaagcctcttgtcatcaacagccgtgaccactttagaatgaaccagttcattgcatgctgaagcgacattgttggtcaagaaaccagtttctggcatagcgctatttgtagttacttttgctttctctgagagactgcagataataagatgtaaacattaacacctcgtgaatacaatttaacttccatttagctatagctttactcagcatgactgtagataaggatagcagcaaacaatcattggagcttaatgaacatttttaaaaataattaccaaggcctcccttctacttgtgagttttgaaattgttctttttattttcagggataccgtttaatttaattatatgatttgtctgcactcagtttattccctactcaaatctcagccccatgttgttctttgttattgtcagaacctggtgagttgttttgaacagaactgttttttccccttcctgtaagacgatgtgactgcacaagagcactgcagtgtttttcataataaacttgtgaactaagaactgagaaggtcaaattttaattgtatcaatgggcaagactggtgctgtttattaaaaaagttaaatcaattgagtaaattttagaatttgtagacttgtaggtaaaataaaaatcaagggcactacataacctctctggtaactccttgacattcttcagattaacttcaggatttatttgtatttcacatattacaatttgtcacattgttggtgtgcactttgtgggttcttcctgcatattaacttgtttgtaagaaaggaaatctgtgctgcttcagtaagacttaattgtaaaaccatataacttgagatttaagtctttgggttgtgttttaataaaacagcatgttttcaggtagag

SEQ ID NO: 185 - DNA, 375 bp, Homo sapiens
  5' terminal sequence. homo sapiens, clone image:4054156, mrna, partial cds (EST R55460) gene.
  modified_base (22): a, t, c or g
  modified_base (34): a, t, c or g
  modified_base (96): a, t, c or g
  modified_base (297): a, t, c or g
cgaagaggatgaggaagagctnctgctgctgcancaagagctccaggccgggctgcgcaccaaggccctgattgtggatgagtcctgccggcggtnaccatcttccaacatagggatatacctccctccttcttataactgaagatcctggagcccggaagattcagggcagacagaccctgataatgagcctggcagggaagggcaaccaacatcttgtaacttgctttccccaccctgtttctgggggcagagcaattgcccaatttctaccctaatccaaagtccctgggtgtnggtggggttaaacgtgctggtgcatcctaggtcatccaagagtgaggcgccaagttcctgaggaagggggcacagaac

SEQ ID NO: 186 - DNA, 542 bp, Homo sapiens
  3' terminal sequence. immunoglobulin kappa constant (IGKC) gene.
  modified_base (23): a, t, c or g
  modified_base (165): a, t, c or g
  modified_base (321): a, t, c or g
  modified_base (369): a, t, c or g
  modified_base (376): a, t, c or g
  modified_base (461): a, t, c or g
  modified_base (472): a, t, c or g
  modified_base (499): a, t, c or g
  modified_base (506): a, t, c or g
  modified_base (511): a, t, c or g
  modified_base (526): a, t, c or g
  modified_base (537): a, t, c or g
gcaaagattcacaatatttattnattctcctccaacattagcataattaaagccaaggaggaggaggggggtgaggtgaaagatgagctggaggaccgcaataggggtaggtcccctgtggaaaaagggtcagaggccaaaggatgggagggggtcaggctgganctgaggagcaggtgggggcacttctccctctaacactctcccctgttgaagctctttgtgacgggcgagctcaggccctgatgggtgacttcgcaggcgtagactttgtgtttctcgtagtctgctttgctcagcgtcagggtgctgctgaggctntagggtgctgtccttgctgtcctgctctgtgacactctcctggggganttacccnatttgggagggcgttatccaccttccactgtactttggcctctctggggatagaagttttttcagcaggcacacaacagaggcanttccagatttncaactgctcatcagatggccgggaagntgaaggncagtnggtgcagccacattncttttgatccnccact

SEQ ID NO: 187 - DNA, 296 bp, Homo sapiens
  5' terminal sequence. melanocortin 1 receptor (alpha melanocyte stimulating hormone receptor) (MC1R) gene.
  modified_base (84): a, t, c or g
  modified_base (121): a, t, c or g
atcacctgcagctccatgctgtccagcctctgcttcctgggcgccatcgcgtggaccgctacatctccatcttctacgcactgnctaccacagcatcgtgaccctgccgcgggcgcgaagnccgttgcggccatctgggtggccagtgtcgtcttcagcacgctcttcatcgcctactacgaccacgtggccgtcctgctgtgcctcgtggtcttcttcctggctatgctggtgctcatggccgtgctgtacgtccacatgctggcccgggcctgccagcacgcccagggcattcg

SEQ ID NO: 188 - DNA, 1270 bp, Homo sapiens
  melanocortin 1 receptor (alpha melanocyte stimulating hormone receptor) (MC1R) gene.
ggagagggtgtgagggcagatctgggggtgcccagatggaaggaggcaggcatgggggacacccaaggccccctggcagcaccatgaactaagcaggacacctggaggggaagaactgtggggacctggaggcctccaacgactccttcctgcttcctggacaggactatggctgtgcagggatcccagagaagacttctgggctccctcaactccacccccacagccatcccccagctggggctggctgccaaccagacaggagcccggtgcctggaggtgtccatctctgacgggctcttcctcagcctggggctggtgagcttggtggagaacgcgctggtggtggccaccatcgccaagaaccggaacctgcactcacccatgtactgcttcatctgctgcctggccttgtcggacctgctggtgagcgggagcaacgtgctggagacggccgtcatcctcctgctggaggccggtgcactggtggcccgggctgcggtgctgcagcagctggacaatgtcattgacgtgatcacctgcagctccatgctgtccagcctctgcttcctgggcgccatcgccgtggaccgctacatctccatcttctacgcactgcgctaccacagcatcgtgaccctgccgcgggcgcggcaagccgttgcggccatctgggtggccagtgtcgtcttcagcacgctcttcatcgcctactacgaccacgtggccgtcctgctgtgcctcgtggtcttcttcctggctatgctggtgctcatggccgtgctgtacgtccacatgctggcccgggcctgccagcacgcccagggcatcgcccggctccacaagaggcagcgcccggtccaccagggctttggccttaaaggcgctgtcaccctcaccatcctgctgggcattttcttcctctgctggggccccttcttcctgcatctcacactcatcgtcctctgccccgagcaccccacgtgcggctgcatcttcaagaacttcaacctctttctcgccctcatcatctgcaatgccatcatcgaccccctcatctacgccttccacagccaggagctccgcaggacgctcaaggaggtgctgacatgctcctggtgagcgcggtgcacgcgctttaagtgtgctgggcagagggaggtggtgatattgtgtggtctggttcctgtgtgaccctgggcagttccttacctccctggtccccgtttgtcaaagaggatggactaaatgatctctgaaagtgttgaag

SEQ ID NO: 189 - DNA, 336 bp, Homo sapiens
  3' terminal sequence. neuregulin 1 (NRG1) gene.
  modified_base (5): a, t, c or g
  modified_base (139): a, t, c or g
  modified_base (151): a, t, c or g
  modified_base (163): a, t, c or g
  modified_base (195): a, t, c or g
  modified_base (321): a, t, c or g
  modified_base (322): a, t, c or g
  modified_base (325): a, t, c or g
  modified_base (326): a, t, c or g
ccaanaccaaatccgagcccttggaccaaactcgcctgcgccgagagccgtccgcgtagagcctccgtctccggcgagatgtccgagcgcaaagaaggcagaggcaaagggaagggcaagaagaaggagcgaggctcgncaagaagccggntccgcgggcggngcagcaggagcccagccttgcctccccaattnaaagagatgaaaagccaggaatcggctgcaggttccaaactagtccttcggtgtgaaaccagttctgaatactcctctctcagattcaagtggttcaagaatggggaatgaattgaatcgaaaaanncannccacaaaatt

SEQ ID NO: 190 - DNA, 366 bp, Homo sapiens
  5' terminal sequence. neuregulin 1 (NRG1) gene.
  modified_base (75): a, t, c or g
  modified_base (270): a, t, c or g
  modified_base (276): a, t, c or g
  modified_base (289): a, t, c or g
  modified_base (317): a, t, c or g
  modified_base (359): a, t, c or g
tctcaacaatatgctcactggagatgacgtttttagatacgtattgattcaccagctggacattctcggggggtnggttaggatggtgaggcccattggcaatgttcatcatattgtttcgttcagaccgaagctctgccagagacggtcatgcagctttttccgctgtttcttggttttgcagtaggccaccacacacatgatgccgaccacaaggagggcgatgcagatgccggttatggtcagcactctcttctggtacagctcctncgcctncataaattcaatnccaagatgcttgtagaagctggccattnacgtagttttttggcagcgattcaccagtaaaacttcatttnggggcac

SEQ ID NO: 191 - DNA, 2490 bp, Homo sapiens
  neuregulin 1 (NRG1) gene.
gtggctgcggggcaattgaaaaagagccggcgaggagttccccgaaacttgttggaactccgggctcgcgcggaggccaggagctgagcggcggcggctgccggacgatgggagcgtgagcaggacggtgataacctctccccgatcgggttgcgagggcgccgggcagaggccaggacgcgagccgccagcggcgggacccatcgacgacttcccggggcgacaggagcagccccgagagccagggcgagcgcccgttccaggtggccggaccgcccgccgcgtccgcgccgcgctccctgcaggcaacgggagacgcccccgcgcagcgcgagcgcctcagcgcggccgctcgctctccccatcgagggacaaacttttcccaaacccgatccgagcccttggaccaaactcgcctgcgccgagagccgtccgcgtagagcgctccgtctccggcgagatgtccgagcgcaaagaaggcagaggcaaagggaagggcaagaagaaggagcgaggctccggcaagaagccggagtccgcggcgggcagccagagcccagccttgcctccccaattgaaagagatgaaaagccaggaatcggctgcaggttccaaactagtccttcggtgtgaaaccagttctgaatactcctctctcagattcaagtggttcaagaatgggaatgaattgaatcgaaaaaacaaaccacaaaatatcaagatacaaaaaaagccagggaagtcagaacttcgcattaacaaagcatcactggctgattctggagagtatatgtgcaaagtgatcagcaaattaggaaatgacagtgcctctgccaatatcaccatcgtggaatcaaacgagatcatcactggtatgccagcctcaactgaaggagcatatgtgtcttcagagtctcccattagaatatcagtatccacagaaggagcaaatacttcttcatctacatctacatccaccactgggacaagccatcttgtaaaatgtgcggagaaggagaaaactttctgtgtgaatggaggggagtgcttcatggtgaaagacctttcaaacccctcgagatacttgtgcaagtgcccaaatgagtttactggtgatcgctgccaaaactacgtaatggccagcttctacaaggcggaggagctgtaccagaagagagtgctgaccataaccggcatctgcatcgccctccttgtggtcggcatcatgtgtgtggtggcctactgcaaaaccaagaaacagcggaaaaagctgcatgaccgtcttcggcagagccttcggtctgaacgaaacaatatgatgaacattgccaatgggcctcaccatcctaacccaccccccgagaatgtccagctggtgaatcaatacgtatctaaaaacgtcatctccagtgagcatattgttgagagagaagcagagacatccttttccaccagtcactatacttccacagcccatcactccactactgtcacccagactcctagccacagctggagcaacggacacactgaaagcatcctttccgaaagccactctgtaatcgtgatgtcatccgtagaaaacagtaggcacagcagcccaactgggggcccaagaggacgtcttaatggcacaggaggccctcgtgaatgtaacagcttcctcaggcatgccagagaaacccctgattcctaccgagactctcctcatagtgaaaggtatgtgtcagccatgaccaccccggctcgtatgtcacctgtagatttccacacgccaagctcccccaaatcgcccccttcggaaatgtctccacccgtgtccagcatgacggtgtccaagccttccatggcggtcagccccttcatggaagaagagagacctctacttctcgtgacaccaccaaggctgcgggagaagaagtttgaccatcaccctcagcagttcagctccttccaccacaaccccgcgcatgacagtaacagcctccctgctagccccttgaggatagtggaggatgaggagtatgaaacgacccaagagtacgagccagcccaagagcctgttaagaaactcgccaatagccggcgggccaaaagaaccaagcccaatggccacattgctaacagattggaagtggacagcaacacaagctcccagagcagtaactcagagagtgaaacagaagatgaaagagtaggtgaagatacgcctttcctgggcatacagaaccccctggcagccagtcttgaggcaacacctgccttccgcctggctgacagcaggactaacccagcaggccgcttctcgacacaggaagaaatccaggccaggctgtctagtgtaattgctaaccaagaccctattgctgtataaaacctaaataaacacatagattcacctgtaaaactttattttatataataaagtattccaccttaaattaaacaatttattttattttagcagttctgcaaataaaaaaaaaaaaa

SEQ ID NO: 192 - DNA, 453 bp, Homo sapiens
  5' terminal sequence. ciliary neurotrophic factor receptor (CNTFR) gene.
  modified_base (53): a, t, c or g
  modified_base (281): a, t, c or g
  modified_base (357): a, t, c or g
  modified_base (402): a, t, c or g
  modified_base (419): a, t, c or g
  modified_base (430): a, t, c or g
  modified_base (436): a, t, c or g
cagatgctacgccgggaaggagtacattatccaggtggcagccaaggacaatnagattgggacatggagtgactggagcgtaccgcccacgctacgccctggactgaggaaccgcgacacctcaccacggaggcccaggctgcggagaccacgaccagcaccaccagctccctggcacccccacctaccacgaagatctgtgaccctggggagctgggcagcggcgggggaccctcggcacccttcttggtcagcgtccccatcactctggccctggctgncgctgccgccactgccagcagtctcttgatctgagcccggcaccccatgaggacatgcagagcacctgcagaggancaggaggccggagcttgagccttgtagaccccggtttctattttncacacgggcaggaggantttttgcattntttttnagacacaattttttgga

SEQ ID NO: 193 - DNA, 1566 bp, Homo sapiens
  ciliary neurotrophic factor receptor (CNTFR) gene.
gcggcggcagcggaggcggcggctccagccggcgcggcgcgaggctcggcggtgggatccggcgggcggtgctagctccgcgctccctgcctcgctcgctgccgggggcggtcggaaggcgcggcgcgaagcccgggtggcccgagggcgcgactctagccttgtcacctcatcttgcccccttggttttggaagtcctgaagagttggtctggaggaggaggaggacattgatgtgcttggtgtgtggccagtggtgaagagatggctgctcctgtcccgtgggcctgctgtgctgtgcttgccgccgccgccgcagttgtctacgcccagagacacagtccacaggaggcaccccatgtgcagtacgagcgcctgggctctgacgtgacactgccatgtgggacagcaaactgggatgctgcggtgacgtggcgggtaaatgggacagacctggcccctgacctgctcaacggctctcagctggtgctccatggcctggaactgggccacagtggcctctacgcctgcttccaccgtgactcctggcacctgcgccaccaagtcctgctgcatgtgggcttgccgccgcgggagcctgtgctcagctgccgctccaacacttaccccaagggcttctactgcagctggcatctgcccacccccacctacattcccaacaccttcaatgtgactgtgctgcatggctccaaaattatggtctgtgagaaggacccagccctcaagaaccgctgccacattcgctacatgcacctgttctccaccatcaagtacaaggtctccataagtgtcagcaatgccctgggccacaatgccacagctatcacctttgacgagttcaccattgtgaagcctgatcctccagaaaatgtggtagcccggccagtgcccagcaaccctcgccggctggaggtgacgtggcagaccccctcgacctggcctgaccctgagtcttttcctctcaagttctttctgcgctaccgacccctcatcctggaccagtggcagcatgtggagctgtccgacggcacagcacacaccatcacagatgcctacgccgggaaggagtacattatccaggtggcagccaaggacaatgagattgggacatggagtgactggagcgtagccgcccacgctacgccctggactgaggaaccgcgacacctcaccacggaggcccaggctgcggagaccacgaccagcaccaccagctccctggcacccccacctaccacgaagatctgtgaccctggggagctgggcagcggcgggggaccctcggcacccttcttggtcagcgtccccatcactctggccctggctgccgctgccgccactgccagcagtctcttgatctgagcccggcaccccatgaggacatgcagagcacctgcagaggagcaggaggccggagctgagcctgcagaccccggtttctattttgcacacgggcaggaggaccttttgcattctcttcagacacaatttgtggagaccccggcgggcccgggcctgccgccccccagccctgccgcaccaagct

SEQ ID NO: 194 - DNA, 349 bp, Homo sapiens
  5' terminal sequence. angiogenin, ribonuclease, rnase a family, 5 (ANG) gene.
  modified_base (280): a, t, c or g
  modified_base (331): a, t, c or g
ccgtgtacacacactcacacaaggacgccaaccccacctagatgcaaagaggattcaaaagaacatctttgcgttttctaccggctccccatcatcgtactagggaggaagaagcgggtgagaaacaaaacttctttccattgtcctgcccgtttctgcggacttgttctgaggccgaggagcctgtgttggaagagatggtgatgggcctgggcgttttgttgttggtcttcgtgctgggtctgggtctgaccccaccgaccctggctcaggataactncaggtacacacacttcctgacccagcactatgatgccaaaccacagggccngggatgacagatactgtg

SEQ ID NO: 195 - DNA, 729 bp, Homo sapiens
  angiogenin, ribonuclease, rnase a family, 5 (ANG) gene.
atgatgccgtgtcagagagcaaagctcctgtccttttggcctaatttggtgatgctgttcttgggtctaccacacctccttttgccctccgcaggagcctgtgttggaagagatggtgatgggcctgggcgttttgttgttggtcttcgtgctgggtctgggtctgaccccaccgaccctggctcaggataactccaggtacacacacttcctgacccagcactatgatgccaaaccacagggccgggatgacagatactgtgaaagcatcatgaggagacggggcctgacctcaccctgcaaagacatcaacacatttattcatggcaacaagcgcagcatcaaggccatctgtgaaaacaagaatggaaaccctcacagagaaaacctaagaataagcaagtcttctttccaggtcaccacttgcaagctacatggaggttccccctggcctccatgccagtaccgagccacagcggggttcagaaacgttgttgttgcttgtgaaaatggcttacctgtccacttggatcagtcaattttccgtcgtccgtaaccagcgggcccctggtcaagtgctggctctgctgtccttgccttccatttcccctctgcacccagaacagtggtggcaacattcattgccaagggcccaaagaaagagctacctggaccttttgttttctgtttgacaacatgtttaataaataaaaatgtcttgatatcagt

SEQ ID NO: 196 - DNA, 452 bp, Homo sapiens
  3' terminal sequence. endoglin (osler-rendu-weber syndrome 1) (ENG) gene.
  modified_base (1): a, t, c or g
  modified_base (40): a, t, c or g
  modified_base (318): a, t, c or g
  modified_base (320): a, t, c or g
  modified_base (384): a, t, c or g
  modified_base (435): a, t, c or g
ngttactccagccttggaccggggctgccacttggagagncgtggcgaccacaaggaggcgcacatcctgagggtcctgccgggccactcggcgggccccggacggttgacggtgaaggtggaactgagctgcgcacccggggatctcgatgccgtcctcatcctgcagggtcccccctacgtgtcctggctcatcgacgccaaccacaacatgcagatctggaccactggagaatactccttcaagatctttccagagaaaaacattcgtggcttcaagctcccagacacacctcaaggcctcctggggggacgcgngnatgcttcaatgccagcattgtggcatccttcgtgggagcttaccgctgggccagcattgtcttnatttcattgccttccagcttgcggttgttagggttgcagaccttaacccgnaccgtttccagaccatt

SEQ ID NO: 197 - DNA, 379 bp, Homo sapiens
  5' terminal sequence. endoglin (osler-rendu-weber syndrome 1) (ENG) gene.
  modified_base (333): a, t, c or g
  modified_base (355): a, t, c or g
aggacgaggcctttgcttgtgcaaccagacaggtcagggctgatgatgttcaagcgcatgaagacagtcctatggcttcctggtcttgagacccggtcttgggacgcagggctaccgtgcagctgagggtgccggttttgggtatgggtactgtgtagaagtggaggaggaagctgaagcgcgggtcaccctcggggcttggggacagcaggctcacacagttgcccttggccgcccggccctgggatgagttccacggtgcctccctcaggccccaagtccagggtggcagctgtctaactggagcaggaactcggagacggatggggacantctgacctgcacaaagcttttnttgccccggcttcgatggtgtttt

SEQ ID NO: 198 - DNA, 3142 bp, Homo sapiens
  endoglin (osler-rendu-weber syndrome 1) (ENG) gene.
cctgggccggccgggctggatgagccgggagctccctgctgccggtcataccacagccttcatctgcgccctggggccaggactgctgctgtcactgccatccattggagcccagcaccccctccccgcccatccttcggacagcaactccagcccagccccgcgtccctgtgtccacttctcctgacccctcggccgccaccccagaaggctggagcagggacgccgtcgctccggccgcctgctcccctcgggtccccgtgcgagcccacgccggccccggtgcccgcccgcagccctgccactggacacaggataaggcccagcgcacaggcccccacgtggacagcatggaccgcggcacgctccctctggctgttgccctgctgctggccagctgcagcctcagccccacaagtcttgcagaaacagtccattgtgaccttcagcctgtgggccccgagaggggcgaggtgacatataccactagccaggtctcgaagggctgcgtggctcaggcccccaatgccatccttgaagtccatgtcctcttcctggagttcccaacgggcccgtcacagctggagctgactctccaggcatccaagcaaaatggcacctggccccgagaggtgcttctggtcctcagtgtaaacagcagtgtcttcctgcatctccaggccctgggaatcccactgcacttggcctacaattccagcctggtcaccttccaagagcccccgggggtcaacaccacagagctgccatccttccccaagacccagatccttgagtgggcagctgagaggggccccatcacctctgctgctgagctgaatgacccccagagcatcctcctccgactgggccaagcccaggggtcactgtccttctgcatgctggaagccagccaggacatgggccgcacgctcgagtggcggccgcgtactccagccttggtccggggctgccacttggaaggcgtggccggccacaaggaggcgcacatcctgagggtcctgccgggccactcggccgggccccggacggtgacggtgaaggtggaactgagctgcgcacccggggatctcgatgccgtcctcatcctgcagggtcccccctacgtgtcctggctcatcgacgccaaccacaacatgcagatctggaccactggagaatactccttcaagatctttccagagaaaaacattcgtggcttcaagctcccagacacacctcaaggcctcctgggggaggcccggatgctcaatgccagcattgtggcatccttcgtggagctaccgctggccagcattgtctcacttcatgcctccagctgcggtggtaggctgcagacctcacccgcaccgatccagaccactcctcccaaggacacttgtagcccggagctgctcatgtccttgatccagacaaagtgtgccgacgacgccatgaccctggtactaaagaaagagcttgttgcgcatttgaagtgcaccatcacgggcctgaccttctgggaccccagctgtgaggcagaggacaggggtgacaagtttgtcttgcgcagtgcttactccagctgtggcatgcaggtgtcagcaagtatgatcagcaatgaggcggtggtcaatatcctgtcgagctcatcaccacagcggaaaaaggtgcactgcctcaacatggacagcctctctttccagctgggcctctacctcagcccacacttcctccaggcctccaacaccatcgagccggggcagcagagctttgtgcaggtcagagtgtccccatccgtctccgagttcctgctccagttagacagctgccacctggacttggggcctgagggaggcaccgtggaactcatccagggccgggcggccaagggcaactgtgtgagcctgctgtccccaagccccgagggtgacccgcgcttcagcttcctcctccacttctacacagtacccatacccaaaaccggcaccctcagctgcacggtagccctgcgtcccaagaccgggtctcaagaccaggaagtccataggactgtcttcatgcgcttgaacatcatcagccctgacctgtctggttgcacaagcaaaggcctcgtcctgcccgccgtgctgggcatcacctttggtgccttcctcatcggggccctgctcactgctgcactctggtacatctactcgcacacgcgtgagtaccccaggcccccacagtgagcatgccgggcccctccatccacccgggggagcccagtgaagcctctgagggattgaggggccctggcaggaccctgacctccgcccctgcccccgctcccgctcccaggttcccccagcaagcgggagcccgtggtggcggtggctgccccggcctcctcggagagcagcagcaccaaccacagcatcgggagcacccagagcaccccctgctccaccagcagcatggcatagccccggccccccgcgctcgcccagcaggagagactgagcagccgccagctgggagcactggtgtgaactcaccctgggagccagtcctccactcgacccagaatggagcctgctctccgcgcctacccttcccgcctccctctcagaggcctgctgccagtgcagccactggcttggaacaccttggggtccctccaccccacagaaccttcaacccagtgggtctgggatatggctgcccaggagacagaccacttgccacgctgttgtaaaaacccaagtccctgtcatttgaacctggatccagcactggtgaactgagctgggcaggaagggagaacttgaaacagattcaggccagcccagccaggccaacagcacctccccgctgggaagagaagagggcccagcccagagccacctggatctatccctgcggcctccacacctgaacttgcctaactaactggcaggggagacaggagcctagcggagcccagcctgggagcccagagggtggcaagaacagtgggcgttgggagcctagctcctgccacatggagccccctctgccggtcgggcagccagcagagggggagtagccaagctgcttgtcctgggcctgcccctgtgtattcaccaccaataaatcagaccatgaaacctgaaaaaaaaaaaaa

SEQ ID NO: 199 - DNA, 402 bp, Homo sapiens
  3' terminal sequence. epidermal growth factor (beta-urogastrone) (EGF) gene.
tatgtttttggtgattttatttaaataattagaagaaattcatcgttgtctataatgaaaacaaatcaggcaatttacttacaatcttgtaactgaaaatacatacaaattctgtgcaatcacaccaagagggaaaattctgtaggggaaaaggacagtaatgactaagaaactccgaagcctcctgtgtaatattttaaaaataaaatgttttcattcaaatattttaaaaaataagccatctaattctgaagaaatcagtttctaaattacatttttcattgattcatcacaactcattttgcaaaatcatcagcatggaccacgccaatgaggagttaaatgcctacactgtatcttaacggtattgtaatattccaatcatttcatgaaactgatata

SEQ ID NO: 200 - DNA, 4877 bp, Homo sapiens
  epidermal growth factor (beta-urogastrone) (EGF) gene.
actgttgggagaggaatcgtatctccatatttcttctttcagccccaatccaagggttgtagctggaactttccatcagttcttcctttctttttcctctctaagcctttgccttgctctgtcacagtgaagtcagccagagcagggctgttaaactctgtgaaatttgtcataagggtgtcaggtatttcttactggcttccaaagaaacatagataaagaaatctttcctgtggcttcccttggcaggctgcattcagaaggtctctcagttgaagaaagagcttggaggacaacagcacaacaggagagtaaaagatgccccagggctgaggcctccgctcaggcagccgcatctggggtcaatcatactcaccttgcccgggccatgctccagcaaaatcaagctgttttcttttgaaagttcaaactcatcaagattatgctgctcactcttatcattctgttgccagtagtttcaaaatttagttttgttagtctctcagcaccgcagcactggagctgtcctgaaggtactctcgcaggaaatgggaattctacttgtgtgggtcctgcacccttcttaattttctcccatggaaatagtatctttaggattgacacagaaggaaccaattatgagcaattggtggtggatgctggtgtctcagtgatcatggattttcattataatgagaaaagaatctattgggtggatttagaaagacaacttttgcaaagagtttttctgaatgggtcaaggcaagagagagtatgtaatatagagaaaaatgtttctggaatggcaataaattggataaatgaagaagttatttggtcaaatcaacaggaaggaatcattacagtaacagatatgaaaggaaataattcccacattcttttaagtgctttaaaatatcctgcaaatgtagcagttgatccagtagaaaggtttatattttggtcttcagaggtggctggaagcctttatagagcagatctcgatggtgtgggagtgaaggctctgttggagacatcagagaaaataacagctgtgtcattggatgtgcttgataagcggctgttttggattcagtacaacagagaaggaagcaattctcttatttgctcctgtgattatgatggaggttctgtccacattagtaaacatccaacacagcataatttgtttgcaatgtccctttttggtgaccgtatcttctattcaacatggaaaatgaagacaatttggatagccaacaaacacactggaaaggacatggttagaattaacctccattcatcatttgtaccacttggtgaactgaaagtagtgcatccacttgcacaacccaaggcagaagatgacacttgggagcctgagcagaaactttgcaaattgaggaaaggaaactgcagcagcactgtgtgtgggcaagacctccagtcacacttgtgcatgtgtgcagagggatacgccctaagtcgagaccggaagtactgtgaagatgttaatgaatgtgctttttggaatcatggctgtactcttgggtgtaaaaacacccctggatcctattactgcacgtgccctgtaggatttgttctgcttcctgatgggaaacgatgtcatcaacttgtttcctgtccacgcaatgtgtctgaatgcagccatgactgtgttctgacatcagaaggtcccttatgtttctgtcctgaaggctcagtgcttgagagagatgggaaaacatgtagcggttgttcctcacccgataatggtggatgtagccagctctgcgttcctcttagcccagtatcctgggaatgtgattgctttcctgggtatgacctacaactggatgaaaaaagctgtgcagcttcaggaccacaaccatttttgctgtttgccaattctcaagatattcgacacatgcattttgatggaacagactatggaactctgctcagccagcagatgggaatggtttatgccctagatcatgaccctgtggaaaataagatatactttgcccatacagccctgaagtggatagagagagctaatatggatggttcccagcgagaaaggcttattgaggaaggagtagatgtgccagaaggtcttgctgtggactggattggccgtagattctattggacagacagagggaaatctctgattggaaggagtgatttaaatgggaaacgttccaaaataatcactaaggagaacatctctcaaccacgaggaattgctgttcatccaatggccaagagattattctggactgatacagggattaatccacgaattgaaagttcttccctccaaggccttggccgtctggttatagccagctctgatctaatctggcccagtggaataacgattgacttcttaactgacaagttgtactggtgcgatgccaagcagtctgtgattgaaatggccaatctggatggttcaaaacgccgaagacttacccagaatgatgtaggtcacccatttgctgtagcagtgtttgaggattatgtgtggttctcagattgggctatgccatcagtaataagagtaaacaagaggactggcaaagatagagtacgtctccaaggcagcatgctgaagccctcatcactggttgtggttcatccattggcaaaaccaggagcagatccctgcttatatcaaaacggaggctgtgaacatatttgcaaaaagaggcttggaactgcttggtgttcgtgtcgtgaaggttttatgaaagcctcagatgggaaaacgtgtctggctctggatggtcatcagctgttggcaggtggtgaagttgatctaaagaaccaagtaacaccattggacatcttgtccaagactagagtgtcagaagataacattacagaatctcaacacatgctagtggctgaaatcatggtgtcagatcaagatgactgtgctcctgtgggatgcagcatgtatgctcggtgtatttcagagggagaggatgccacatgtcagtgtttgaaaggatttgctggggatggaaaactatgttctgatatagatgaatgtgagatgggtgtcccagtgtgcccccctgcctcctccaagtgcatcaacaccgaaggtggttatgtctgccggtgctcagaaggctaccaaggagatgggattcactgtcttgatattgatgagtgccaactgggggtgcacagctgtggagagaatgccagctgcacaaatacagagggaggctatacctgcatgtgtgctggacgcctgtctgaaccaggactgatttgccctgactctactccaccccctcacctcagggaagatgaccaccactattccgtaagaaatagtgactctgaatgtcccctgtcccacgatgggtactgcctccatgatggtgtgtgcatgtatattgaagcattggacaagtatgcatgcaactgtgttgttggctacatcggggagcgatgtcagtaccgagacctgaagtggtgggaactgcgccacgctggccacgggcagcagcagaaggtcatcgtggtggctgtctgcgtggtggtgcttgtcatgctgctcctcctgagcctgtggggggcccactactacaggactcagaagctgctatcgaaaaacccaaagaatccttatgaggagtcgagcagagatgtgaggagtcgcaggcctgctgacactgaggatgggatgtcctcttgccctcaaccttggtttgtggttataaaagaacaccaagacctcaagaatgggggtcaaccagtggctggtgaggatggccaggcagcagatgggtcaatgcaaccaacttcatggaggcaggagccccagttatgtggaatgggcacagagcaaggctgctggattccagtatccagtgataagggctcctgtccccaggtaatggagcgaagctttcatatgccctcctatgggacacagacccttgaagggggtgtcgagaagccccattctctcctatcagctaacccattatggcaacaaagggccctggacccaccacaccaaatggagctgactcagtgaaaactggaattaaaaggaaagtcaagaagaatgaactatgtcgatgcacagtatcttttctttcaaaagtagagcaaaactataggttttggttccacaatctctacgactaatcacctactcaatgcctggagacagatacgtagttgtgcttttgtttgctcttttaagcagtctcactgcagtcttatttccaagtaagagtactgggagaatcactaggtaacttattagaaacccaaattgggacaacagtgctttgtaaattgtgttgtcttcagcagtcaatacaaatagatttttgtttttgttgttcctgcagccccagaagaaattaggggttaaagcagacagtcacactggtttggtcagttacaaagtaatttctttgatctggacagaacatttatatcagtttcatgaaatgattggaatattacaataccgttaagatacagtgtaggcatttaactcctcattggcgtggtccatgctgatgattttgccaaaatgagttgtgatgaatcaatgaaaaatgtaatttagaaactgatttcttcagaattagatggccttattttttaaaatatttgaatgaaaacattttatttttaaaatattacacaggaggccttcggagtttcttagtcattactgtccttttcccctacagaattttccctcttggtgtgattgcacagaatttgtatgtattttcagttacaagattgtaagtaaattgcctgatttgttttcattatagacaacgatgaatttcttctaattatttaaataaaatcaccaaaaacat

SEQ ID NO: 201 - DNA, 153 bp, Homo sapiens
  3' terminal sequence. hmt1 (hnrnp methyltransferase, s. cerevisiae)-like 1 (HRMT1L1) gene.
  modified_base (35): a, t, c or g
attagacctcacattagggaaaacatcaaaatgantcacgcacgacccttgagatcctgaggttggcccagccgagcccgtgctcagaagccccccagctccggcccccagctgcccgcacgcccgccctcaccagcaggcaggtccccatcc

SEQ ID NO: 202 - DNA, 472 bp, Homo sapiens
  5' terminal sequence. hmt1 (hnrnp methyltransferase, s. cerevisiae)-like 1 (HRMT1L1) gene.
  modified_base (32): a, t, c or g
  modified_base (367): a, t, c or g
  modified_base (388): a, t, c or g
  modified_base (393): a, t, c or g
  modified_base (407): a, t, c or g
  modified_base (438): a, t, c or g
  modified_base (449): a, t, c or g
  modified_base (471): a, t, c or g
agtgaatcgcagggagaagagcctgctgagtncagtgaggcgggtctcctgcaggagggagtacagccagaggagtttgtggccatcgcggactacgctgccaccgatgagacccagctcagttttttgagaggagaaaaaattcttatcctgagacaaaccactgcagattggtggtggggtgagcgtgcgggctgctgtgggtacattccggcaaaccatgtggggaagcacgtggatgagtacgaccccgaggacacgtggcaggatgaagagtacttcggcagctatggaactctgaaactccacttgggagatgttggcagaccagccacgaacaactaaataccacagtgttcattcctgncaggaattaaagaatccctgnacggnttaaagttcttccngggacgtggggctgtggggatttgggatccntcagtctcttnttgttgcacattttgcgtggcnt

SEQ ID NO: 203 - DNA, 2093 bp, Homo sapiens
  hmt1 (hnrnp methyltransferase, s. cerevisiae)-like 1 (HRMT1L1) gene.
cactgcgcttgcgcgggttgagggcggtggctcagtctcctggaaaggaccgtccacccctccgcgctggcggtgtggacgcggaactcagcggagaaacgcgattgagaaatggaaaagaaaatgaaataaatcagcagttatgaggcagagcctaagagaactatggcaacatcaggtgactgtcccagaagtgaatcgcagggagaagagcctgctgagtgcagtgaggcgggtctcctgcaggagggagtacagccagaggagtttgtggccatcgcggactacgctgccaccgatgagacccagctcagttttttgagaggagaaaaaattcttatcctgagacaaaccactgcagattggtggtggggtgagcgtgcgggctgctgtgggtacattccggcaaaccatgtggggaagcacgtggatgagtacgaccccgaggacacgtggcaggatgaagagtacttcggcagctatggaactctgaaactccacttggagatgttggcagaccagccacgaacaactaaataccacagtgtcatcctgcagaataaagaatccctgacggataaagtcatcctggacgtgggctgtgggactgggatcatcagtctcttctgtgcacactatgcgcggcctagagcggtgtacgcggtggaggccagtgagatggcacagcacacggggcagctggtcctgcagaacggctttgctgacatcatcaccgtgtaccagcagaaggtggaggatgtggtgctgcccgagaaggtggacgtgctggtgtctgagtggatggggacctgcctgctgtttgagttcatgatcgagtccatcctgtatgcccgggatgcctggctgaaggaggacggggtcatttggcccaccatggctgcgttgcaccttgtgccctgcagtgctgataggattatcgtagccaaggtgctcttctgggacaacgcgtacgagttcaacctcagcgctctgaaatctttagcagttaaggagtttttttcaaagcccaagtataaccacattttgaaaccagaagactgtctctctgaaccgtgcactatattgcagttggacatgagaaccgtgcaaatttctgatctagagaccctgaggggcgagctgcgcttcgacatcaggaaggcggggaccctgcacggcttcacggcctggtttagcgtccacttccagagcctgcaggaggggcagccgccgcaggtgctcagcacggggcccttccaccccaccacacactggaagcagacgctgttcatgatggacgacccagtccctgtccatacaggagacgtggtcacgggttcagttgtgttgcagagaaacccagtgtggagaaggcacatgtctgtggctctgagctgggctgtcacttccagacaagaccccacatctcaaaaagttggagaaaaagtcttccccatctggagatgacagttgatgctttatttggaaagcagtgtgcatatcttgaggggtgatgaacacaagcaaaccaagttgcacctggcttctgcacactcctgcgaaagtcggtgaacattcactccacattgacccctccctagcctggcaggtgacgtcagggtccttcacagacaaacacgcttgggctcggcaggagctgccgtggccacccccgctgcccagtgtctgccctctagaagtaggctgtgtttccaggtgttcacccgtggtgcccacagtgccgacccgtggctgggtcggagctccatgttcctaagctaggtctaggtctacactcctaggacgcacgcatatcagcccgtgtaccctgtgacagtgactgtccccacctcctgtgttagtggtgcccttactgccgtcgctcatccactcgtgtgggacgtaggattgcacagggctgtgccagtggcgtgtagggaacactgccctggctcagcgtgcgagctaaggtggcgatgtatgcgatgggactctgcatgggatagtacagttgtgtagacgtcttccaaataaattatgtgttggtgccatcgcacatgctcaataaatattttaaatgagtgaaaaaaaaa

SEQ ID NO: 204 - DNA, 431 bp, Homo sapiens
  3' terminal sequence. ets variant gene 4 (e1a enhancer-binding protein, e1af) (ETV4) gene.
  modified_base (250): a, t, c or g
  modified_base (278): a, t, c or g
  modified_base (303): a, t, c or g
  modified_base (381): a, t, c or g
  modified_base (396): a, t, c or g
  modified_base (424): a, t, c or g
tgggggcctttattaaggtctggcagatgtggtggaggtggaagtacaaacccaggcctgggcctaggaaagggcagaagaaaggcaaagggtcccttggagcaggaacccatccctctctgcttatacccagcacccctcatcccaggttcctttcttcaacctccgcctgcctctgggaacacagagcaccaagaactgacaaaccgggaccctccaggggccacagcgtgggggcagagtccagggnttctgtctccccgcagtggggagatctnggggagctcaggtgaacctcctcancctcctgccagtatgaagttggggaagcgccttttcttgtcccccagaacagaacaaactcttgttctctgtgggttngggggaaaaggtttnggggggtttggacttaggggagaagttnagcttga

SEQ ID NO: 205 - DNA, 435 bp, Homo sapiens
  5' terminal sequence. ets variant gene 4 (e1a enhancer-binding protein, e1af) (ETV4) gene.
  modified_base (38): a, t, c or g
  modified_base (294): a, t, c or g
  modified_base (360): a, t, c or g
  modified_base (405): a, t, c or g
  modified_base (416): a, t, c or g
  modified_base (422): a, t, c or g
  modified_base (428): a, t, c or g
gtcccctgcccctgcccttggacagtcgcccctacagncctttccccgggcagagaacggaatttcctgagatcctctggcacctcccagccccaccctggccatgggtacctcggggaacatagctccgtcttccagcagcccctgggacatttgccactccttcacatctcagggagggggccgggaacccctcccaggccccctaccaacaccagctgtcggagccctgcccaccctatccccagcagagctttaagcaagaataccatgatcccctgtatggaacagggnggggccagccaggccgtgggaaccaggggtgggggttcaatgggggcacagggtacccaggggggnggggggttggttgattcaaaacagggaacagacgggatttttggnttaaggatttnaggttntttaancgggttg

SEQ ID NO: 206 - DNA, 447 bp, Homo sapiens
  5' terminal sequence. annexin a11 (ANXA11) gene.
  modified_base (290): a, t, c or g
  modified_base (365): a, t, c or g
  modified_base (407): a, t, c or g
  modified_base (416): a, t, c or g
  modified_base (425): a, t, c or g
agaccccagtcctctttgacatttatgagataaaggaagccatcaagggggttggcactgatgaagcctgcctgattgagatcctcgcttcccgcagcaatgagcacatccgagaattaaacagagcctacaaagcagaattcaaaaagaccctggaagaggccattcgaagcgacacatcagggcacttccagcggctcctcatctctctctctcagggaaaccgtgatgaaagcacaaacgtggacatgtcactcgcccagagagatgcccagggagctgtatgcggnccggggagaaccgcctggggaacagacgagtccaagtttcaattgcggtttctgtggcttcccgggagccgggcnccacctgggtaggcagtttttcaatgagttaccagagaatgnacagggccnggacatttntagaagagcatctgcccggaga

SEQ ID NO: 207 - DNA, 1958 bp, Homo sapiens
  annexin a11 (ANXA11) gene.
gctgctgcgcccgcggctccccagtgccccgagtgccccgcgggccccgcgagcgggagtgggacccagccctaggcagaacccaggcgccgcgcccgggacgcccgcggagagagccactcccgcccacgtcccatttcgcccctcgcgtccggagtccccgtggccagatctaaccatgagctaccctggctatcccccgcccccaggtggctacccaccagctgcaccaggtggtggtccctggggaggtgctgcctaccctcctccgcccagcatgccccccatcgggctggataacgtggccacctatgcggggcagttcaaccaggactatctctcgggaatggcggccaacatgtctgggacatttggaggagccaacatgcccaacctgtaccctggggcccctggggctggctacccaccagtgccccctggcggctttgggcagcccccctctgcccagcagcctgttcctccctatgggatgtatccacccccaggaggaaacccaccctccaggatgccctcatatccgccatacccaggggcccctgtgccgggccagcccatgccaccccccggacagcagcccccaggggcctaccctgggcagccaccagtgacctaccctggtcagcctccagtgccactccctgggcagcagcagccagtgccgagctacccaggatacccggggtctgggactgtcacccccgctgtgcccccaacccagtttggaagccgaggcaccatcactgatgctcccggctttgaccccctgcgagatgccgaggtcctgcggaaggccatgaaaggcttcgggacggatgagcaggccatcattgactgcctggggagtcgctccaacaagcagcggcagcagatcctactttccttcaagacggcttacggcaaggatttgatcaaagatctgaaatctgaactgtcaggaaactttgagaagacaatcttggctctgatgaagaccccagtcctctttgacatttatgagataaaggaagccatcaagggggttggcactgatgaagcctgcctgattgagatcctcgcttcccgcagcaatgagcacatccgagaattaaacagagcctacaaagcagaattcaaaaagaccctggaagaggccattcgaagcgacacatcagggcacttccagcggctcctcatctctctctctcagggaaaccgtgatgaaagcacaaacgtggacatgtcactcgcccagagagatgcccaggagctgtatgcggccggggagaaccgcctgggaacagacgagtccaagttcaatgcggttctgtgctcccggagccgggcccacctggtagcagttttcaatgagtaccagagaatgacaggccgggacattgagaagagcatctgccgggagatgtccggggacctggaggagggcatgctggccgtggtgaaatgtctcaagaataccccagccttctttgcggagaggctcaacaaggccatgaggggggcaggaacaaaggaccggaccctgattcgcatcatggtgtctcgcagcgagaccgacctcctggacatcagatcagagtataagcggatgtacggcaagtcgctgtaccacgacatctcgggagatacttcaggggattaccggaagattctgctgaagatctgtggtggcaatgactgaacagtgactggtggctcacttctgcccacctgccggcaacaccagtgccaggaaaaggccaaaagaatgtctgtttctaacaaatccacaaatagccccgagattcaccgtcctagagcttaggcctgtcttccacccctcctgacccgtatagtgtgccacaggacctgggtcggtctagaactctctcaggatgccttttctaccccatccctcacagcctcttgctgctaaaatagatgtttcatttttctgaaaaaaa

SEQ ID NO: 208 - DNA, 433 bp, Homo sapiens
  5' terminal sequence. platelet-derived growth factor receptor, beta polypeptide (PDGFRB) gene.
  modified_base (52): a, t, c or g
  modified_base (168): a, t, c or g
  modified_base (178): a, t, c or g
  modified_base (185): a, t, c or g
  modified_base (304): a, t, c or g
  modified_base (388): a, t, c or g
  modified_base (397): a, t, c or g
  modified_base (414): a, t, c or g
gccagatgaagcaaggccatataccctaaacttccatcctgggggtcagctnggctcctgggagattccagatcacacatcacactctggggactcaggaaccatgccccttccccaggcccccagcaagtctcaagaacacagctgcacaggccttgacttagagtnacagccggtntcctggnaagcccccagcagctgccccagggacatgggaagaccacgggacctctttcactacccacgatgacctccgggggtatcctggggcaaaagggacaaagagggcaaatgagatcacctnctgcagcccaccacttccagcacctgtgccgaggtttttcgttcgaagacagaattggacagttgaggacagttattgtctttntttaaaagnacaaggaaggtttcagnttgggttacccccaaggag

SEQ ID NO: 209 - DNA, 5570 bp, Homo sapiens
  platelet-derived growth factor receptor, beta polypeptide (PDGFRB) gene.
ggcccctcagccctgctgcccagcacgagcctgtgctcgccctgcccaacgcagacagccagacccagggcggcccctctggcggctctgctcctcccgaaggatgcttggggagtgaggcgaagctgggcgctcctctcccctacagcagcccccttcctccatccctctgttctcctgagccttcaggagcctgcaccagtcctgcctgtccttctactcagctgttacccactctgggaccagcagtctttctgataactgggagagggcagtaaggaggacttcctggagggggtgactgtccagagcctggaactgtgcccacaccagaagccatcagcagcaaggacaccatgcggcttccgggtgcgatgccagctctggccctcaaaggcgagctgctgttgctgtctctcctgttacttctggaaccacagatctctcagggcctggtcgtcacacccccggggccagagcttgtcctcaatgtctccagcaccttcgttctgacctgctcgggttcagctccggtggtgtgggaacggatgtcccaggagcccccacaggaaatggccaaggcccaggatggcaccttctccagcgtgctcacactgaccaacctcactgggctagacacgggagaatacttttgcacccacaatgactcccgtggactggagaccgatgagcggaaacggctctacatctttgtgccagatcccaccgtgggcttcctccctaatgatgccgaggaactattcatctttctcacggaaataactgagatcaccattccatgccgagtaacagacccacagctggtggtgacactgcacgagaagaaaggggacgttgcactgcctgtcccctatgatcaccaacgtggcttttctggtatctttgaggacagaagctacatctgcaaaaccaccattggggacagggaggtggattctgatgcctactatgtctacagactccaggtgtcatccatcaacgtctctgtgaacgcagtgcagactgtggtccgccagggtgagaacatcaccctcatgtgcattgtgatcgggaatgaggtggtcaacttcgagtggacatacccccgcaaagaaagtgggcggctggtggagccggtgactgacttcctcttggatatgccttaccacatccgctccatcctgcacatccccagtgccgagttagaagactcggggacctacacctgcaatgtgacggagagtgtgaatgaccatcaggatgaaaaggccatcaacatcaccgtggttgagagcggctacgtgcggctcctgggagaggtgggcacactacaatttgctgagctgcatcggagccggacactgcaggtagtgttcgaggcctacccaccgcccactgtcctgtggttcaaagacaaccgcaccctgggcgactccagcgctggcgaaatcgccctgtccacgcgcaacgtgtcggagacccggtatgtgtcagagctgacactggttcgcgtgaaggtggcagaggctggccactacaccatgcgggccttccatgaggatgctgaggtccagctctccttccagctacagatcaatgtccctgtccgagtgctggagctaagtgagagccaccctgacagtggggaacagacagtccgctgtcgtggccggggcatgccccagccgaacatcatctggtctgcctgcagagacctcaaaaggtgtccacgtgagctgccgcccacgctgctggggaacagttccgaagaggagagccagctggagactaacgtgacgtactgggaggaggagcaggagtttgaggtggtgagcacactgcgtctgcagcacgtggatcggccactgtcggtgcgctgcacgctgcgcaacgctgtgggccaggacacgcaggaggtcatcgtggtgccacactccttgccctttaaggtggtggtgatctcagccatcctggccctggtggtgctcaccatcatctcccttatcatcctcatcatgctttggcagaagaagccacgttacgagatccgatggaaggtgattgagtctgtgagctctgacggccatgagtacatctacgtggaccccatgcagctgccctatgactccacgtgggagctgccgcgggaccagcttgtgctgggacgcaccctcggctctggggcctttgggcaggtggtggaggccacggctcatggcctgagccattctcaggccacgatgaaagtggccgtcaagatgcttaaatccacagcccgcagcagtgagaagcaagcccttatgtcggagctgaagatcatgagtcaccttgggccccacctgaacgtggtcaacctgttgggggcctgcaccaaaggaggacccatctatatcatcactgagtactgccgctacggagacctggtggactacctgcaccgcaacaaacacaccttcctgcagcaccactccgacaagcgccgcccgcccagcgcggagctctacagcaatgctctgcccgttgggctccccctgcccagccatgtgtccttgaccggggagagcgacggtggctacatggacatgagcaaggacgagtcggtggactatgtgcccatgctggacatgaaaggagacgtcaaatatgcagacatcgagtcctccaactacatggccccttacgataactacgttccctctgcccctgagaggacctgccgagcaactttgatcaacgagtctccagtgctaagctacatggacctcgtgggcttcagctaccaggtggccaatggcatggagtttctggcctccaagaactgcgtccacagagacctggcggctaggaacgtgctcatctgtgaaggcaagctggtcaagatctgtgactttggcctggctcgagacatcatgcgggactcgaattacatctccaaaggcagcacctttttgcctttaaagtggatggctccggagagcatcttcaacagcctctacaccaccctgagcgacgtgtggtccttcgggatcctgctctgggagatcttcaccttgggtggcaccccttacccagagctgcccatgaacgagcagttctacaatgccatcaaacggggttaccgcatggcccagcctgcccatgcctccgacgagatctatgagatcatgcagaagtgctgggaagagaagtttgagattcggccccccttctcccagctggtgctgcttctcgagagactgttgggcgaaggttacaaaaagaagtaccagcaggtggatgaggagtttctgaggagtgaccacccagccatccttcggtcccaggcccgcttgcctgggttccatggcctccgatctcccctggacaccagctccgtcctctatactgccgtgcagcccaatgagggtgacaacgactatatcatccccctgcctgaccccaaacccgaggttgctgacgagggcccactggagggttcccccagcctagccagctccaccctgaatgaagtcaacacctcctcaaccatctcctgtgacagccccctggagccccaggacgaaccagagccagagccccagcttgagctccaggtggagccggagccagagctggaacagttgccggattcggggtgccctgcgcctcgggcggaagcagaggatagcttcctgtagggggctggcccctaccctgccctgcctgaagctccccccctgccagcacccagcatctcctggcctggcctgaccgggcttcctgtcagccaggctgcccttatcagctgtccccttctggaagctttctgctcctgacgtgttgtgccccaaaccctggggctggcttaggaggcaagaaaactgcaggggccgtgaccagccctctgcctccagggaggccaactgactctgagccagggttcccccagggaactcagttttcccatatgtaagatgggaaagttaggcttgatgacccagaatctaggattctctccctggctgacaggtggggagaccgaatccctccctgggaagattcttggagttactgaggtggtaaattaacttttttctgttcagccagctacccctcaaggaatcatagctctctcctcgcactttttatccacccaggagctagggaagagaccctagcctccctggctgctggctgagctagggcctagccttgagcagtgttgcctcatccagaagaaagccagtctcctccctatgatgccagtccctgcgttccctggcccgagctggtctggggccattaggcagcctaattaatgctggaggctgagccaagtacaggacacccccagcctgcagcccttgcccagggcacttggagcacacgcagccatagcaagtgcctgtgtccctgtccttcaggcccatcagtcctggggctttttctttatcaccctcagtcttaatccatccaccagagtctagaaggccagacgggccccgcatctgtgatgagaatgtaaatgtgccagtgtggagtggccacgtgtgtgtgccagtatatggccctggctctgcattggacctgctatgaggctttggaggaatccctcaccctctctgggcctcagtttccccttcaaaaaatgaataagtcggacttattaactctgagtgccttgccagcactaacattctagagtattccaggtggttgcacatttgtccagatgaagcaaggccatataccctaaacttccatcctgggggtcagctgggctcctgggagattccagatcacacatcacactctggggactcaggaaccatgccccttccccaggcccccagcaagtctcaagaacacagctgcacaggccttgacttagagtgacagccggtgtcctggaaagccccaagcagctgccccagggacatgggaagaccacgggacctctttcactacccacgatgacctccgggggtatcctgggcaaaagggacaaagagggcaaatgagatcacctcctgcagcccaccactccagcacctgtgccgaggtctgcgtcgaagacagaatggacagtgaggacagttatgtcttgtaaaagacaagaagcttcagatggtaccccaagaaggatgtgagaggtggccgcttggagtttgcccctcacccaccagctgccccatccctgaggcagcgctccatgggggtatggttttgtcactgcccagacctagcagtgacatctcattgtccccagcccagtgggcattggaggtgccaggggagtcagggttgtagccaagacgcccccgcacggggagggttgggaagggggtgcaggaagctcaacccctctgggcaccaaccctgcattgcaggttggcaccttacttccctgggatccccagagttggtccaaggagggagagtgggttctcaatacggtaccaaagatataatcacctaggtttacaaatatttttaggactcacgttaactcacatttatacagcagaaatgctattttgtatgctgttaagtttttctatctgtgtacttttttttaagggaaagatttt

SEQ ID NO: 210 - DNA, 406 bp, Homo sapiens
  5' terminal sequence. williams-beuren syndrome chromosome region 14 (WBSCR14) gene.
  modified_base (371): a, t, c or g
  modified_base (384): a, t, c or g
gaccggcgtatcacacacatctccgcggacaggaagcggcgcttcaacatcaagctggggtttgacacccttcatgggctcgtgagcacactcagtgcccagcccagcctcaaggtgagcaaagctaccacgctgcagaagacagctgagtacatccttatgctacagcaggagcgtgcgggcttgcaggaggaggcccagcagctgcggggatgagattgaggagctcaatgccgccattaacctgtgccagcagcagctgcccgccacaggggtacccattcacacaccagcgttttgaccagatgcgagacatgtttgatggactacgtccgaacccgtacgctgcacaactgggaagttctggggtntttcagcatcctnattccggcctctgttttgagtc

SEQ ID NO: 211 - DNA, 3293 bp, Homo sapiens
  williams-beuren syndrome chromosome region 14 (WBSCR14) gene.
ccccgcgctgcgcggagcagggaccaggcggttgcggcggcgacagccatggccggcgcgctggcaggtctggccgcgggcttgcaggtcccgcgggtcgcgcccagcccagactcggactcggacacagactcggaggacccgagtctccggcgcagcgcgggcggcttgctccgctcgcaggtcatccacagcggtcacttcatggtgtcgtcgccgcacagcgactcgctgccccggcggcgcgaccaggaggggtccgtggggccctccgacttcgggccgcgcagtatcgaccccacactcacacgcctcttcgagtgcttgagcctggcctacagtggcaagctggtgtctcccaagtggaagaatttcaaaggcctcaagctgctctgcagagacaagatccgcctgaacaacgccatctggagggcctggtatatccagtatgtgaagcggaggaagagccccgtgtgtggcttcgtgacccccctgcaggggcctgaggctgatgcgcaccggaagccggaggccgtggtcctggaggggaactactggaagcggcgcatcgaggtggtgatgcgggaataccacaagtggcgcatctactacaagaagcggctccgtaagcccagcagggaagatgacctcctggcccctaagcaggcggaaggcaggtggccgccgccggagcaatggtgcaaacagctcttctccagtgtggtccccgtgctgctgggggacccagaggaggagccgggtgggcggcagctcctggacctcaattgctttttgtccgacatctcagacactctcttcaccatgactcagtccggcccttcgcccctgcagctgccgcctgaggatgcctacgtcggcaatgctgacatgatccagccggacctgacgccactgcagccaagcctggatgacttcatggacatctcagatttctttaccaactcccgcctcccacagccgcccatgccttcaaacttcccagagccccccagcttcagccccgtggttgactccctcttcagcagtgggaccctgggcccagaggtgcccccggcttcctcggccatgacccacctctctggacacagccgtctgcaggctcggaacagctgccctggccccttggactccagcgccttcctgagttctgatttcctccttcctgaagaccccaagccccggctcccaccccctcctgtacccccacctctgctgcattaccctccccctgccaaggtgccaggcctggagccctgccccccacctcccttccctcccatggcaccacccactgctttgctgcaggaagagcctctcttctctcccaggtttcccttccccaccgtccctcctgccccaggagtgtctccgctgcctgctcctgcagccttcccacccaccccacagtctgtccccagcccagcccccacccccttccccatagagcttctacccttggggtattcggagcctgcctttgggccttgcttctccatgcccagaggcaagccccccgccccatcccctaggggacagaaagccagcccccctaccttagcccctgccactgccagtccccccaccactgcggggagcaacaacccctgcctcacacagctgctcacagcagctaagccggagcaagccctggagccaccacttgtatccagcaccctcctccggtccccagggtccccgcaggagacagtccctgaattcccctgcacattccttcccccgaccccggcccctacaccgccccggccacctccaggcccggccacattggccccttccaggcccctgcttgtccccaaagcggagcggctctcacccccagcgcccagcggcagtgaacggcggctgtcaggggacctcagctccatgccaggccctgggactctgagcgtccgtgtctctcccccgcaacccatcctcagccggggccgtccagacagcaacaagaccgagaaccggcgtatcacacacatctccgcggagcagaagcggcgcttcaacatcaagctggggtttgacacccttcatgggctcgtgagcacactcagtgcccagcccagcctcaaggtgagcaaagctaccacgctgcagaagacagctgagtacatccttatgctacagcaggagcgtgcgggcttgcaggaggaggcccagcagctgcgggatgagattgaggagctcaatgccgccattaacctgtgccagcagcagctgcccgccacaggggtacccatcacacaccagcgttttgaccagatgcgagacatgtttgatgactacgtccgaacccgtacgctgcacaactggaagttctgggtgttcagcatcctcatccggcctctgtttgagtccttcaacgggatggtgtccacggcaagtgtgcacaccctccgccagacctcactggcctggctggaccagtactgctctctgcccgctctccggccaactgtcctgaactccctacgccagctgggcacatctaccagtatcctgaccgacccgggccgcatccctgagcaagccacacgggcagtcacagagggcacccttggcaaacctttatagtcctggccagaccctgctgctcactcagctgccctgggggctgctttccctgggcacgggctccagggatcatctctgggcactcccttcctgccccaggccctggctctgcccttccctggggggtggagcagggtccaggtttcacacttgccacctcctggaggtcaagaagagcagagtccccgtccctgctctgccactgtgctccagcaccgtgaccttgggtgactcgtccgctgtctttggaccgctgtgtttcaatctgcaaaatggggatggggaaggttcaatcagcagatgacccccaggccttggcagctgtgacattgggggcctaggctggcaactccgggggctcaacggtggaaagaggaggatgctgtttatctgtcacctccacttgctccccgacaggtggggcacagacctctgttcctgagcagagaagcagaaaaggaggttccctctctctgctccttcactgctgacccagaggggctgcaggatggtttcccctgggagaggccaggagggcctgatcccaggagacaccagggccagagtgaccacagcagggcaggcatcatgtgtgtgtgtgtgtgtggatgtgtgtgtgtgggttttgtaaagaattcttgaccaataaaagcaaaaactgtctgctggttaaaaaaaaaaaaaaa

SEQ ID NO: 212 - DNA, 207 bp, Homo sapiens
  5' terminal sequence. cd74 antigen (invariant polypeptide of major histocompatibility complex, class ii antigen-associated) (CD74) gene.
  modified_base (173): a, t, c or g
  modified_base (205): a, t, c or g
cctttggccttggcttttctagtcctatttacctgtcaggctgagccatctctcttccctttccccagtcatcactccccaaggaagagccaatgttttccacccataatcctttctgccgacccctagttccctctgctcagccaagcttgttatcagctttcagggccatngttcacattagaataaaaggtagtaattaganaa

SEQ ID NO: 213 - DNA, 1304 bp, Homo sapiens
  cd74 antigen (invariant polypeptide of major histocompatibility complex, class ii antigen-associated) (CD74) gene.
ttcccagatgcacaggaggagaagcaggagctgtcgggaagatcagaagccagtcatggatgaccagcgcgaccttatctccaacaatgagcaactgcccatgctgggccggcgccctggggccccggagagcaagtgcagccgcggagccctgtacacaggcttttccatcctggtgactctgctcctcgctggccaggccaccaccgcctacttcctgtaccagcagcagggccggctggacaaactgacagtcacctcccagaacctgcagctggagaacctgcgcatgaagcttcccaagcctcccaagcctgtgagcaagatgcgcatggccaccccgctgctgatgcaggcgctgcccatgggagccctgccccaggggcccatgcagaatgccaccaagtatggcaacatgacagaggaccatgtgatgcacctgctccagaatgctgaccccctgaaggtgtacccgccactgaaggggagcttcccggagaacctgagacaccttaagaacaccatggagaccatagactggaaggtctttgagagctggatgcaccattggctcctgtttgaaatgagcaggcactccttggagcaaaagcccactgacgctccaccgaaagagtcactggaactggaggacccgtcttctgggctgggtgtgaccaagcaggatctgggcccagtccccatgtgagagcagcagaggcggtcttcaacatcctgccagccccacacagctacagctttcttgctcccttcagcccccagcccctcccccatgtcccaccctgtacctcatcccatgagacctggtgcctggctctttcgtcacccttgtacaagacaaaccaagtcggaacagcagataacaatgcagcaaggccctgctgcccaatctccatctgtcaacaggggcgtgaggtcccaggaagtggccaaaagctagacagatccccgttcctgacatcacagcagcctccaacacaaggctccaagacctaggctcatggacgagatgggaaggcacagggagaagggataaccctacacccagaccccaggctggacatgctgactgtcctctcccctccagcctttggccttggcttttctagcctatttacctgcaggctgagccactctcttccctttccccagcatcactccccaaggaagagccaatgttttggacccataatcctttctgccgacccctagttccctctgctcagccaagcttgttatcagctttcagggccatggttcacattagaataaaaggtagtaattag

SEQ ID NO: 214 - DNA, 355 bp, Homo sapiens
  5' terminal sequence. annexin a7 (ANXA7) gene.
  modified_base (100): a, t, c or g
  modified_base (106): a, t, c or g
  modified_base (207): a, t, c or g
  modified_base (230): a, t, c or g
  modified_base (266): a, t, c or g
  modified_base (286): a, t, c or g
  modified_base (293): a, t, c or g
  modified_base (307): a, t, c or g
  modified_base (324): a, t, c or g
  modified_base (331): a, t, c or g
  modified_base (339): a, t, c or g
  modified_base (345): a, t, c or g
aggaactatccgaccagctgccaacttcgatgctataagagatgcagaaattcttcgtaaggcaatgaagggttttgggacagatgagcaggcaattgtngatgtngttgccaaccgtttccaatgatcagaggcaaaaaattaaagcagcatttaagacctcctatggcaaggatttaatcaaagatctcaaatcagagttaagtngaaatatggaagaactgatcctnggccctcttcatgcctcctacgtattacgatgcctngagctttacggaaagcaatncagggancaggtactcaggancgttgtatttgatttgngattttngtgcacangatcanattcaggtaa

SEQ ID NO: 215 - DNA, 2176 bp, Homo sapiens
  annexin a7 (ANXA7) gene.
gaacccggtctcccgcaagatggagccgggttgggctgtgacgctgctgctggggtcagaatgtcatacccaggctatcccccaacaggctacccacctttccctggatatcctcctgcaggtcaggagtcatcttttcccccttctggtcagtatccttatcctagtggctttcctccaatgggaggaggtgcctacccacaagtgccaagtagtggctacccaggagctggaggctaccctgcgcctggaggttatccagcccctggaggctatcctggtgccccacagccagggggagctccatcctatcccggagttcctccaggccaaggatttggagtcccaccaggtggagcaggcttttctgggtatccacagccaccttcacagtcttatggaggtggtccagcacaggttccactacctggtggctttcctggaggacagatgccttctcagtatcctggaggacaacctacttaccctagtcagatcaatacagattctttttcttcctatcctgttttctctcctgtttctttggattatagcagtgaacctgccacagtgactcaggtcactcaaggaactatccgaccagctgccaacttcgatgctataagagatgcagaaattcttcgtaaggcaatgaagggttttgggacagatgagcaggcaattgtggatgtggtggccaaccgttccaatgatcagaggcaaaaaattaaagcagcatttaagacctcctatggcaaggatttaatcaaagatctcaaatcagagttaagtggaaatatggaagaactgatcctggccctcttcatgcctcctacgtattacgatgcctggagcttacggaaagcaatgcagggagcaggaactcaggaacgtgtattgattgagattttgtgcacaagaacaaatcaggaaatccgagaaattgtcagatgttatcagtcagaatttggacgagaccttgaaaaggacattaggtcagatacatcaggacattttgaacgtttacttgtgtccatgtgccagggaaatcgtgatgagaaccagagtataaaccaccaaatggctcaggaagatgctcagcgtctctatcaagctggtgaggggagactagggaccgatgaatcttgctttaacatgatccttgccacaagaagctttcctcagctgagagctaccatggaggcttattctaggatggctaatcgagacttgttaagcagtgtgagccgtgagttttccggatatgtagaaagtggtttgaagaccatcttgcagtgtgccctgaaccgccctgccttctttgctgagaggctctactatgctatgaaaggtgctggcacagatgactccaccctggtccggattgtggtcactcgaagtgagattgaccttgtacaaataaaacagatgttcgctcagatgtatcagaagactctgggcacaatgattgcaggtgacacgagtggagattaccgaagacttcttctggctattgtgggccagtaggagggatttttttttttttaatgaaaaaaaaatttctattcatagcttatccttcagagcaatgacctgcatgcagcaatatcaaacatcagctaaccgaaagagctttctgtcaaggaccgtatcagggtaatgtgcttggtttgcacatgttgttattgccttaattctaattttattttgttctctacatacaatcaatgtaaagccatatcacaatgatacagtaatattgcaatgtttgtaaaccttcattcttactagtttcattctaatcaagatgtcaaattgaataaaaatcacagcaatctctgattctgtgtaataatattgaataattttttagaaggttactgaaagctctgccttccggaatccctctaagtctgcttgatagagtggatagtatgttaaaactgtgtactttaaaaaaaaattcaacctttacatctagaataatttgcatctcattttgcctaaattggttctgtattcataaacactttccacatagaaaatagattagtattacctgtggcaccttttaagaaagggtcaaatgtttatatgcttaagatacatagcctccctttttttcgcgttgtttcctttttttaaattgagttatgacaaataaaaaattgcatat

SEQ ID NO: 216 - DNA, 525 bp, Homo sapiens
  3' terminal sequence. thrombospondin 1 (THBS1) gene.
  modified_base (6): a, t, c or g
  modified_base (8): a, t, c or g
  modified_base (11): a, t, c or g
  modified_base (14): a, t, c or g
  modified_base (106): a, t, c or g
  modified_base (109): a, t, c or g
  modified_base (225): a, t, c or g
  modified_base (448): a, t, c or g
  modified_base (504): a, t, c or g
  modified_base (519): a, t, c or g
tcctgnantanctncaacaaccgatgtgagggaaaatcggtccagacacggacctgccacattcaggagtgtgacaagagatttaaacaggatggtggctggagcntgngttccccgtggtcatcttgttctgtgacatgtggtgatggtgtgatcacaaggatccggctctgcaactctcccagcccccagatgaacgggaaaccctgtgaaggcgaaggcggngagaccaaagcctgcaagaaagacgcctgccccagtaagtgtgaggtccgctgcaagggtgagcatgggcagcagctctgcccagctggttgcctgggcatctgcagcctgcagtttcagtggggtcataggagcaggaaggttacctacttaggagaaacaaacagaaggcaaagtcctgcaggctcagcaacttctttttaattgaaaaacaaattcaccnttttccccagctttttttccttgtgttcaggggaggcagaggttttttgaacgggnttaggggatttttgncaagtt

SEQ ID NO: 217 - DNA, 5722 bp, Homo sapiens
  thrombospondin 1 (THBS1) gene.
ggacgcacaggcattccccgcgcccctccagccctcgccgccctcgccaccgctcccggccgccgcgctccggtacacacaggatccctgctgggcaccaacagctccaccatggggctggcctggggactaggcgtcctgttcctgatgcatgtgtgtggcaccaaccgcattccagagtctggcggagacaacagcgtgtttgacatctttgaactcaccggggccgcccgcaaggggtctgggcgccgactggtgaagggccccgacccttccagcccagctttccgcatcgaggatgccaacctgatcccccctgtgcctgatgacaagttccaagacctggtggatgctgtgcgggcagaaaagggtttcctccttctggcatccctgaggcagatgaagaagacccggggcacgctgctggccctggagcggaaagaccactctggccaggtcttcagcgtggtgtccaatggcaaggcgggcaccctggacctcagcctgaccgtccaaggaaagcagcacgtggtgtctgtggaagaagctctcctggcaaccggccagtggaagagcatcaccctgtttgtgcaggaagacagggcccagctgtacatcgactgtgaaaagatggagaatgctgagttggacgtccccatccaaagcgtcttcaccagagacctggccagcatcgccagactccgcatcgcaaaggggggcgtcaatgacaatttccagggggtgctgcagaatgtgaggtttgtctttggaaccacaccagaagacatcctcaggaacaaaggctgctccagctctaccagtgtcctcctcacccttgacaacaacgtggtgaatggttccagccctgccatccgcactaactacattggccacaagacaaaggacttgcaagccatctgcggcatctcctgtgatgagctgtccagcatggtcctggaactcaggggcctgcgcaccattgtgaccacgctgcaggacagcatccgcaaagtgactgaagagaacaaagagttggccaatgagctgaggcggcctcccctatgctatcacaacggagttcagtacagaaataacgaggaatggactgttgatagctgcactgagtgtcactgtcagaactcagttaccatctgcaaaaaggtgtcctgccccatcatgccctgctccaatgccacagttcctgatggagaatgctgtcctcgctgttggcccagcgactctgcggacgatggctggtctccatggtccgagtggacctcctgttctacgagctgtggcaatggaattcagcagcgcggccgctcctgcgatagcctcaacaaccgatgtgagggctcctcggtccagacacggacctgccacattcaggagtgtgacaaaagatttaaacaggatggtggctggagccactggtccccgtggtcatcttgttctgtgacatgtggtgatggtgtgatcacaaggatccggctctgcaactctcccagcccccagatgaatgggaaaccctgtgaaggcgaagcgcgggagaccaaagcctgcaagaaagacgcctgccccatcaatggaggctggggtccttggtcaccatgggacatctgttctgtcacctgtggaggaggggtacagaaacgtagtcgtctctgcaacaaccccgcaccccagtttggaggcaaggactgcgttggtgatgtaacagaaaaccagatctgcaacaagcaggactgtccaattgatggatgcctgtccaatccctgctttgccggcgtgaagtgtactagctaccctgatggcagctggaaatgtggtgcttgtccccctggttacagtggaaatggcatccagtgcacagatgttgatgagtgcaaagaagtgcctgatgcctgcttcaaccacaatggagagcaccggtgtgagaacacggaccccggctacaactgcctgccctgccccccacgcttcaccggctcacagcccttcggccagggtgtcgaacatgccacggccaacaaacaggtgtgcaagccccgtaacccctgcacggatgggacccacgactgcaacaagaacgccaagtgcaactacctgggccactatagcgaccccatgtaccgctgcgagtgcaagcctggctacgctggcaatggcatcatctgcggggaggacacagacctggatggctggcccaatgagaacctggtgtgcgtggccaatgcgacttaccactgcaaaaaggataattgccccaaccttcccaactcagggcaggaagactatgacaaggatggaattggtgatgcctgtgatgatgacgatgacaatgataaaattccagatgacagggacaactgtccattccattacaacccagctcagtatgactatgacagagatgatgtgggagaccgctgtgacaactgtccctacaaccacaacccagatcaggcagacacagacaacaatggggaaggagacgcctgtgctgcagacattgatggagacggtatcctcaatgaacgggacaactgccagtacgtctacaatgtggaccagagagacactgatatggatggggttggagatcagtgtgacaattgccccttggaacacaatccggatcagctggactctgactcagaccgcattggagatacctgtgacaacaatcaggatattgatgaagatggccaccagaacaatctggacaactgtccctatgtgcccaatgccaaccaggctgaccatgacaaagatggcaagggagatgcctgtgaccacgatgatgacaacgatggcattcctgatgacaaggacaactgcagactcgtgcccaatcccgaccagaaggactctgacggcgatggtcgaggtgatgcctgcaaagatgattttgaccatgacagtgtgccagacatcgatgacatctgtcctgagaatgttgacatcagtgagaccgatttccgccgattccagatgattcctctggaccccaaagggacatcccaaaatgaccctaactgggttgtacgccatcagggtaaagaactcgtccagactgtcaactgtgatcctggactcgctgtaggttatgatgagtttaatgctgtggacttcagtggcaccttcttcatcaacaccgaaagggacgatgactatgctggatttgtctttggctaccagtccagcagccgcttttatgttgtgatgtggaagcaagtcacccagtcctactgggacaccaaccccacgagggctcagggatactcgggcctttctgtgaaagttgtaaactccaccacagggcctggcgagcacctgcggaacgccctgtggcacacaggaaacacccctggccaggtgcgcaccctgtggcatgaccctcgtcacataggctggaaagatttcaccgcctacagatggcgtctcagccacaggccaaagacgggtttcattagagtggtgatgtatgaagggaagaaaatcatggctgactcaggacccatctatgataaaacctatgctggtggtagactagggttgtttgtcttctctcaagaaatggtgttcttctctgacctgaaatacgaatgtagagatccctaatcatcaaattgttgattgaaagactgatcataaaccaatgctggtattgcaccttctggaactatgggcttgagaaaacccccaggatcacttctccttggcttccttcttttctgtgcttgcatcagtgtggactcctagaacgtgcgacctgcctcaagaaaatgcagttttcaaaaacagactcatcagcattcagcctccaatgaataagacatcttccaagcatataaacaattgctttggtttccttttgaaaaagcatctacttgcttcagttgggaaggtgcccattccactctgcctttgtcacagagcagggtgctattgtgaggccatctctgagcagtggactcaaaagcattttcaggcatgtcagagaagggaggactcactagaattagcaaacaaaaccaccctgacatcctccttcaggaacacggggagcagaggccaaagcactaaggggagggcgcatacccgagacgattgtatgaagaaaatatggaggaactgttacatgttcggtactaagtcattttcaggggattgaaagactattgctggatttcatgatgctgactggcgttagctgattaacccatgtaaataggcacttaaatagaagcaggaaagggagacaaagactggcttctggacttcctccctgatccccacccttactcatcaccttgcagtggccagaattagggaatcagaatcaaaccagtgtaaggcagtgctggctgccattgcctggtcacattgaaattggtggcttcattctagatgtagcttgtgcagatgtagcaggaaaataggaaaacctaccatctcagtgagcaccagctgcctcccaaaggaggggcagccgtgcttatatttttatggttacaatggcacaaaattattatcaacctaactaaaacattccttttctcttttttccgtaattactaggtagttttctaattctctcttttggaagtatgatttttttaaagtctttacgatgtaaaatatttattttttacttattctggaagatctggctgaaggattattcatggaacaggaagaagcgtaaagactatccatgtcatctttgttgagagtcttcgtgactgtaagattgtaaatacagattatttattaactctgttctgcctggaaatttaggcttcatacggaaagtgtttgagagcaagtagttgacatttatcagcaaatctcttgcaagaacagcacaaggaaaatcagtctaataagctgctctgccccttgtgctcagagtggatgttatgggattccttttttctctgttttatcttttcaagtggaattagttggttatccatttgcaaatgttttaaattgcaaagaaagccatgaggtcttcaatactgttttaccccatcccttgtgcatatttccagggagaaggaaagcatatacacttttttctttcatttttccaaaagagaaaaaaatgacaaaaggtgaaacttacatacaaatattacctcatttgttgtgtgactgagtaaagaatttttggatcaagcggaaagagtttaagtgtctaacaaacttaaagctactgtagtacctaaaaagtcagtgttgtacatagcataaaaactctgcagagaagtattcccaataaggaaatagcattgaaatgttaaatacaatttctgaaagttatgttttttttctatcatctggtataccattgctttatttttataaattattttctcattgccattggaatagaatattcagattgtgtagatatgctatttaaataatttatcaggaaatactgcctgtagagttagtatttctatttttatataatgtttgcacactgaattgaagaattgttggttttttcttttttttgttttttttttttttttttttttttttgcttttgacctcccatttttactatttgccaatacctttttctaggaatgtgcttttttttgtacacatttttatccattttacattctaaagcagtgtaagttgtatattactgtttcttatgtacaaggaacaacaataaatcatatggaaatttatattt

SEQ ID NO: 218 - DNA, 397 bp, Homo sapiens
  3' terminal sequence. protein tyrosine phosphatase, non-receptor type 2 (PTPN2) gene.
  modified_base (179): a, t, c or g
  modified_base (215): a, t, c or g
  modified_base (343): a, t, c or g
  modified_base (351): a, t, c or g
  modified_base (383): a, t, c or g
ttaatgctgccaaaaagtataaaaatacagtaggaatggcagtacaatacaaagtaatctctcctaatttatttcttgtacatctttctacatttcatacactcattaaaaacacttaacacatccaattaaaggttctgcaaagtcttctgctggtgggtgctcttcatcccctgggntgtaaagtttactttgtaaacaaacaactgtgaggncaatctagagggttaggcgagcctcactttagtttccggagtggggcttcagggtcttgctttgcacatcaatgggttcaaaatttataggctgcaggaatattctcaaggtcatggaatattagggngtctggtncaatcttggggcccttttttcttttttcgttncatttctccattta

SEQ ID NO: 219 - DNA, 338 bp, Homo sapiens
  5' terminal sequence. protein tyrosine phosphatase, non-receptor type 2 (PTPN2) gene.
  modified_base (279): a, t, c or g
  modified_base (305): a, t, c or g
  modified_base (336): a, t, c or g
ggctccttgaaccctgaccatgggcctgcggtgatccactgtagtgcaggcattgggcgctctggcaccttctctctggtagacacttgtcttgttttgatggaaaaaggagatgatattaacataaaacaagtgttactgaacatgagaaaataccgaatgggtcttattcagaccccagatcaactgagattctcatacatggctataatagaaggagcaaaatgtataaagggagattctagtatacagaaacgatggaaagaactttctaaggangacttatctcctgcctttgatcattncaccaaacaaaataatgactgaaaaatacantg

SEQ ID NO: 220 - DNA, 2287 bp, Homo sapiens
  protein tyrosine phosphatase, non-receptor type 2 (PTPN2) gene.
ggggggcctgagcctctccgccggcgcaggctctgctcgcgccagctcgctcccgcagccatgcccaccaccatcgagcgggagttcgaagagttggatactcagcgtcgctggcagccgctgtacttggaaattcgaaatgagtcccatgactatcctcatagagtggccaagtttccagaaaacagaaatcgaaacagatacagagatgtaagcccatatgatcacagtcgtgttaaactgcaaaatgctgagaatgattatattaatgccagtttagttgacatagaagaggcacaaaggagttacatcttaacacagggtccacttcctaacacatgctgccatttctggcttatggtttggcagcagaagaccaaagcagttgtcatgctgaaccgcattgtggagaaagaatcggttaaatgtgcacagtactggccaacagatgaccaagagatgctgtttaaagaaacaggattcagtgtgaagctcttgtcagaagatgtgaagtcgtattatacagtacatctactacaattagaaaatatcaatagtggtgaaaccagaacaatatctcactttcattatactacctggccagattttggagtccctgaatcaccagcttcatttctcaatttcttgtttaaagtgagagaatctggctccttgaaccctgaccatgggcctgcggtgatccactgtagtgcaggcattgggcgctctggcaccttctctctggtagacacttgtcttgttttgatggaaaaaggagatgatattaacataaaacaagtgttactgaacatgagaaaataccgaatgggtcttattcagaccccagatcaactgagattctcatacatggctataatagaaggagcaaaatgtataaagggagattctagtatacagaaacgatggaaagaactttctaaggaagacttatctcctgcctttgatcattcaccaaacaaaataatgactgaaaaatacaatgggaacagaataggtctagaagaagaaaaactgacaggtgaccgatgtacaggactttcctctaaaatgcaagatacaatggaggagaacagtgagagtgctctacggaaacgtattcgagaggacagaaaggccaccacagctcagaaggtgcagcagatgaaacagaggctaaatgagaatgaacgaaaaagaaaaaggtggttatattggcaacctattctcactaagatggggtttatgtcagtcattttggttggcgcttttgttggctggagactgttttttcagcaaaatgccctataaacaattaattttgcccagcaagcttctgcactagtaactgacagtgctacattaatcataggggtttgtctgcagcaaacgcctcatatcccaaaaacggtgcagtagaatagacatcaaccagataagtgatatttacagtcacaagcccaacatctcaggactcttgactgcaggttcctctgaaccccaaactgtaaatggctgtctaaaataaagacattcatgtttgttaaaaactggtaaattttgcaactgtattcatacatgtcaaacacagtatttcacctgaccaacattgagatatcctttatcacaggatttgtttttggaggctatctggattttaacctgcacttgatataagcaataaatattgtggttttatctacgttattggaaagaaaatgacatttaaataatgtgtgtaatgtataatgtactattgacatgggcatcaacacttttattcttaagcatttcagggtaaatatattttataagtatctatttaatcttttgtagttaactgtactttttaagagctcaatttgaaaaatctgttactaaaaaaaaaaattgtatgtcgattgaattgtactggatacattttccatttttctaaaaagaagtttgatatgagcagttagaagttggaataagcaatttctactatatattgcatttcttttatgttttacagttttccccattttaaaaagaaaagcaaacaaagaaacaaaagtttttcctaaaaatatctttgaaggaaaattctccttactgggatagtcaggtaaacagttggtcaagactttgtaaagaaattggtttctgtaaatcccattattgatatgtttatttttcatgaaaatttcaatgtagttggggtagattatgatttaggaagcaaaagtaagaagcagcattttatgattcataatttcagtttactagactgaagttttgaagtaaaccc

SEQ ID NO: 221 - DNA, 296 bp, Homo sapiens
  3' terminal sequence. epha2 (EPHA2) gene.
  modified_base (114): a, t, c or g
  modified_base (219): a, t, c or g
  modified_base (278): a, t, c or g
  modified_base (285): a, t, c or g
ctcggctggctcacacacccgtatggcaaagggtgggacctgatgcagaacatcatgaatgacatgccgatctacatgtactccgtgtgcaacgtgatgtctggcgaccagganaactggctccgcaccaactgggtgtaccgaggagaggctgagcgtatcttcattgagctcaagtttactgtacgtgactgcaacagcttccctgggtggcgccanttcctggcaaggagactttcaacctctactatgccgagtcggacctgggactacggcancaacttncagaagcgcct

SEQ ID NO: 222 - DNA, 3921 bp, Homo sapiens
  epha2 (EPHA2) gene.
cggaagttgcgcgcaggccggcgggcgggagcggacaccgaggccggcgtgcaggcgtgcgggtgtgcgggagccgggctcggggggatcggaccgagagcgagaagcgcggcatggagctccaggcagcccgcgcctgcttcgccctgctgtggggctgtgcgctggccgcggccgcggcggcgcagggcaaggaagtggtactgctggactttgctgcagctggaggggagctcggctggctcacacacccgtatggcaaagggtgggacctgatgcagaacatcatgaatgacatgccgatctacatgtactccgtgtgcaacgtgatgtctggcgaccaggacaactggctccgcaccaactgggtgtaccgaggagaggctgagcgtaacaactttgagctcaactttactgtacgtgactgcaacagcttccctggtggcgccagctcctgcaaggagactttcaacctctactatgccgagtcggacctggactacggcaccaacttccagaagcgcctgttcaccaagattgacaccattgcgcccgatgagatcaccgtcagcagcgacttcgaggcacgccacgtgaagctgaacgtggaggagcgctccgtggggccgctcacccgcaaaggcttctacctggccttccaggatatcggtgcctgtgtggcgctgctctccgtccgtgtctactacaagaagtgccccgagctgctgcagggcctggcccacttccctgagaccatcgccggctctgatgcaccttccctggccactgtggccggcacctgtgtggaccatgccgtggtgccaccggggggtgaagagccccgtatgcactgtgcagtggatggcgagtggctggtgcccattgggcagtgcctgtgccaggcaggctacgagaaggtggaggatgcctgccaggcctgctcgcctggattttttaagtttgaggcatctgagagcccctgcttggagtgccctgagcacacgctgccatcccctgagggtgccacctcctgcgagtgtgaggaaggcttcttccgggcacctcaggacccagcgtcgatgccttgcacacgacccccttccgccccacactacctcacagccgtgggcatgggtgccaaggtggagctgcgctggacgccccctcaggacagcgggggccgcgaggacattgtctacagcgtcacctgcgaacagtgctggcccgagtctggggaatgcgggccgtgtgaggccagtgtgcgctactcggagcctcctcacggactgacccgcaccagtgtgacagtgagcgacctggagccccacatgaactacaccttcaccgtggaggcccgcaatggcgtctcaggcctggtaaccagccgcagcttccgtactgccagtgtcagcatcaaccagacagagccccccaaggtgaggctggagggccgcagcaccacctcgcttagcgtctcctggagcatccccccgccgcagcagagccgagtgtggaagtacgaggtcacttaccgcaagaagggagactccaacagctacaatgtgcgccgcaccgagggtttctccgtgaccctggacgacctggccccagacaccacctacctggtccaggtgcaggcactgacgcaggagggccagggggccggcagcaaggtgcacgaattccagacgctgtccccggagggatctggcaacttggcggtgattggcggcgtggctgtcggtgtggtcctgcttctggtgctggcaggagttggcttctttatccaccgcaggaggaagaaccagcgtgcccgccagtccccggaggacgtttacttctccaagtcagaacaactgaagcccctgaagacatacgtggacccccacacatatgaggaccccaaccaggctgtgttgaagttcactaccgagatccatccatcctgtgtcactcggcagaaggtgatcggagcaggagagtttggggaggtgtacaagggcatgctgaagacatcctcggggaagaaggaggtgccggtggccatcaagacgctgaaagccggctacacagagaagcagcgagtggacttcctcggcgaggccggcatcatgggccagttcagccaccacaacatcatccgcctagagggcgtcatctccaaatacaagcccatgatgatcatcactgagtacatggagaatggggccctggacaagttccttcgggagaaggatggcgagttcagcgtgctgcagctggtgggcatgctgcggggcatcgcagctggcatgaagtacctggccaacatgaactatgtgcaccgtgacctggctgcccgcaacatcctcgtcaacagcaacctggtctgcaaggtgtctgactttggcctgtcccgcgtgctggaggacgaccccgaggccacctacaccaccagtggcggcaagatccccatccgctggaccgccccggaggccatttcctaccggaagttcacctctgccagcgacgtgtggagctttggcattgtcatgtgggaggtgatgacctatggcgagcggccctactgggagttgtccaaccacgaggtgatgaaagccatcaatgatggcttccggctccccacacccatggactgcccctccgccatctaccagctcatgatgcagtgctggcagcaggagcgtgcccgccgccccaagttcgctgacatcgtcagcatcctggacaagctcattcgtgcccctgactccctcaagaccctggctgactttgacccccgcgtgtctatccggctccccagcacgagcggctcggagggggtgcccttccgcacggtgtccgagtggctggagtccatcaagatgcagcagtatacggagcacttcatggcggccggctacactgccatcgagaaggtggtgcagatgaccaacgacgacatcaagaggattggggtgcggctgcccggccaccagaagcgcatcgcctacagcctgctgggactcaaggaccaggtgaacactgtggggatccccatctgagcctcgacagggcctggagccccatcggccaagaatacttgaagaaacagagtggcctccctgctgtgccatgctgggccactggggactttatttatttctagttctttcctccccctgcaacttccgctgaggggtctcggatgacaccctggcctgaactgaggagatgaccagggatgctgggctgggccctctttccctgcgagacgcacacagctgagcacttagcaggcaccgccacgtcccagcatccctggagcaggagccccgccacagccttcggacagacatataggatattcccaagccgaccttccctccgccttctcccacatgaggccatctcaggagatggagggcttggcccagcgccaagtaaacagggtacctcaagccccatttcctcacactaagagggcagactgtgaacttgactgggtgagacccaaagcggtccctgtccctctagtgccttctttagaccctcgggccccatcctcatccctgactggccaaacccttgctttcctgggcctttgcaagatgcttggttgtgttgaggtttttaaatatatattttgtactttgtggagagaatgtgtgtgtgtggcagggggccccgccagggctggggacagagggtgtcaaacattcgtgagctggggactcagggaccggtgctgcaggagtgtcctgcccatgccccagtcggccccatctctcatccttttggataagtttctattctgtcagtgttaaagattttgttttgttggacatttttttcgaatcttaatttattattttttttatatttattgttagaaaatgacttatttctgctctggaataaagttgcagatgattcaaaccg

SEQ ID NO: 223 - DNA, 437 bp, Homo sapiens
  3' terminal sequence. tissue inhibitor of metalloproteinase 1 (erythroid potentiating activity, collagenase inhibitor) (TIMP1) gene.
  modified_base (82): a, t, c or g
  modified_base (141): a, t, c or g
  modified_base (159): a, t, c or g
  modified_base (245): a, t, c or g
  modified_base (257): a, t, c or g
  modified_base (309): a, t, c or g
  modified_base (354): a, t, c or g
  modified_base (369): a, t, c or g
  modified_base (386): a, t, c or g
  modified_base (396): a, t, c or g
ggaacagggtggacactgtgcaggcttcagcttccactccgggcaggattcaggctatctgggaccgcaggacttgccaggngcacagccctggctcccgaggcaggcaggcaaggtgacgggactggaagcccttttcanagccttggaggagctggnccgtccacaagcaatgagtgccactctgcagtttgcaggggatggataaacagggaaacactgtgcattcctcacagccaacagtntaggtcttggtnaagccccggcgctgagctaagctcaggcttttccaggggagccacgaaactncaggtagtgatgtgcaagagtccatcctgcagttttccagcaatnagaaactcctcgttngcggtttttggggaccnttggaagttntccgcagacatttttccatgggccgggttttaagacgaacc

SEQ ID NO: 224 - DNA, 466 bp, Homo sapiens
  5' terminal sequence. tissue inhibitor of metalloproteinase 1 (erythroid potentiating activity, collagenase inhibitor) (TIMP1) gene.
  modified_base (4): a, t, c or g
  modified_base (55): a, t, c or g
  modified_base (330): a, t, c or g
  modified_base (348): a, t, c or g
  modified_base (367): a, t, c or g
  modified_base (402): a, t, c or g
  modified_base (419): a, t, c or g
  modified_base (453): a, t, c or g
  modified_base (460): a, t, c or g
gccncagatccagcgcccagagagacaccagagaacccaccatggccccctttgnagcccctggcttctggcatcctgttgttgctgtggctgatagcccccagcagggcctgcacctgtgtcccaccccacccacagacggccttctgcaattccgacctcgtcatcagggccaagttcgtggggacaccagaagtcaaccagaccaccttataccagcgttatgagatcaagatgaccaagatgtataaagggttccaagccttaggggatgccgctgacatccggttcgtctacacccccgccatggagagtgtctgcggatacttncacaggtcccacaaccgnagcgaggagtttctcattngctggaaaactgtaggatggacttcttgcacattnactaccttgcagttttngtgggttccctgggaacagtctgaggtttagttnagcggtnggggtt

SEQ ID NO: 225 - DNA, 782 bp, Homo sapiens
  tissue inhibitor of metalloproteinase 1 (erythroid potentiating activity, collagenase inhibitor) (TIMP1) gene.
aggggccttagcgtgccgcatcgccgagatccagcgcccagagagacaccagagaacccaccatggccccctttgagcccctggcttctggcatcctgttgttgctgtggctgatagcccccagcagggcctgcacctgtgtcccaccccacccacagacggccttctgcaattccgacctcgtcatcagggccaagttcgtggggacaccagaagtcaaccagaccaccttataccagcgttatgagatcaagatgaccaagatgtataaagggttccaagccttaggggatgccgctgacatccggttcgtctacacccccgccatggagagtgtctgcggatacttccacaggtcccacaaccgcagcgaggagtttctcattgctggaaaactgcaggatggactcttgcacatcactacctgcagtttcgtggctccctggaacagcctgagcttagctcagcgccggggcttcaccaagacctacactgttggctgtgaggaatgcacagtgtttccctgtttatccatcccctgcaaactgcagagtggcactcattgcttgtggacggaccagctcctccaaggctctgaaaagggcttccagtcccgtcaccttgcctgcctgcctcgggagccagggctgtgcacctggcagtccctgcggtcccagatagcctgaatcctgcccggagtggaactgaagcctgcacagtgtccaccctgttcccactcccatctttcttccggacaatgaaataaagagttaccacccagc

SEQ ID NO: 226 - DNA, 353 bp, Homo sapiens
  5' terminal sequence. ephrin-a1 (EFNA1) gene.
acagctactactacatctcagccaaacccatccaccagcatgaagaccgctgcttgaggttgaaggtgactgtcagtggcaaaatcactcacagtcctcaggcccatgtcaatccacaggagaagagacttgcagcagatgacccagaggtgcgggttctacatagcatcggtcacagtgctgccccacgcctcttcccacttgcctggactgtgctgctccttccacttctgctgctgcaaaccccgtgaaggtgtatgccacacctggccttaaagagggacaggctgaagagagggacaggcactccaaacctgtcttgggggccactttcagagcccccagcccttggg

SEQ ID NO: 227 - DNA, 1480 bp, Homo sapiens
  ephrin-a1 (EFNA1) gene.
gcggagaaagccagtgggaacccagacccataggagacccgcgtccccgctcggcctggccaggccccgcgctatggagttcctctgggcccctctcttgggtctgtgctgcagtctggccgctgctgatcgccacaccgtcttctggaacagttcaaatcccaagttccggaatgaggactacaccatacatgtgcagctgaatgactacgtggacatcatctgtccgcactatgaagatcactctgtggcagacgctgccatggagcagtacatactgtacctggtggagcatgaggagtaccagctgtgccagccccagtccaaggaccaagtccgctggcagtgcaaccggcccagtgccaagcatggcccggagaagctgtctgagaagttccagcgcttcacacctttcaccctgggcaaggagttcaaagaaggacacagctactactacatctccaaacccatccaccagcatgaagaccgctgcttgaggttgaaggtgactgtcagtggcaaaatcactcacagtcctcaggcccatgtcaatccacaggagaagagacttgcagcagatgacccagaggtgcgggttctacatagcatcggtcacagtgctgccccacgcctcttcccacttgcctggactgtgctgctccttccacttctgctgctgcaaaccccgtgaaggtgtatgccacacctggccttaaagagggacaggctgaagagagggacaggcactccaaacctgtcttggggccactttcagagcccccagccctgggaaccactcccaccacaggcataagctatcacctagcagcctcaaaacgggtcagtattaaggttttcaaccggaaggaggccaaccagcccgacagtgccatccccaccttcacctcggagggacggagaaagaagtggagacagtcctttcccaccattcctgcctttaagccaaagaaacaagctgtgcaggcatggtcccttaaggcacagtgggagctgagctggaaggggccacgtggatgggcaaagcttgtcaaagatgccccctccaggagagagccaggatgcccagatgaactgactgaaggaaaagcaagaaacagtttcttgcttggaagccaggtacaggagaggcagcatgcttgggctgacccagcatctcccagcaagacctcatctgtggagctgccacagagaagtttgtagccaggtactgcattctctcccatcctggggcagcactccccagagctgtgccagcaggggggctgtgccaacctgttcttagagtgtagctgtaagggcagtgcccatgtgtacattctgcctagagtgtagcctaaagggcagggcccacgtgtatagtatctgtatataagttgctgtgtgtctgtcctgatttctacaactggagtttttttatacaatgttctttgtctcaaaataaagcaatgtgttttttcgg

SEQ ID NO: 228 - DNA, 170 bp, Homo sapiens
  3' terminal sequence. endothelin receptor type a (EDNRA) gene.
ttttaaggtttctgtaaacttttattttacacttatgggccactgcaactcagggccttggcttctggctcatttctacaaagttacttgttgaaaagatgtagtaaaggtagaaattggaaatattcctgctagtaaaccacagttacttaccagtccataaataaaat

SEQ ID NO: 229 - DNA, 4105 bp, Homo sapiens
  endothelin receptor type a (EDNRA) gene.
gaattcgcggccgcctcttgcggtcccagagtggagtggaaggtctggagctttgggaggagacggggaggacagactggaggcgtgttcctccggagttttctttttcgtgcgagccctcgcgcgcgcgtacagtcatcccgctggtctgacgattgtggagaggcggtggagaggcttcatccatcccacccggtcgtcgccggggattggggtcccagcgacacctccccgggagaagcagtgcccaggaagttttctgaagccggggaagctgtgcagccgaagccgccgccgcgccggagcccgggacaccggccaccctccgcgccacccaccctcgctttctccggcttcctctggcccaggcgccgcgcggacccggcagctgtctgcgcacgccgagctccacggtgaaaaaaaaagtgaaggtgtaaaagcagcacaagtgcaataagagatatttcctcaaatttgcctcaagatggaaaccctttgcctcagggcatccttttggctggcactggttggatgtgtaatcagtgataatcctgagagatacagcacaaatctaagcaatcatgtggatgatttcaccacttttcgtggcacagagctcagcttcctggttaccactcatcaacccactaatttggtcctacccagcaatggctcaatgcacaactattgcccacagcagactaaaattacttcagctttcaaatacattaacactgtgatatcttgtactattttcatcgtgggaatggtggggaatgcaactctgctcaggatcatttaccagaacaaatgtatgaggaatggccccaacgcgctgatagccagtcttgcccttggagaccttatctatgtggtcattgatctccctatcaatgtatttaagctgctggctgggcgctggccttttgatcacaatgactttggcgtatttctttgcaagctgttcccctttttgcagaagtcctcggtggggatcaccgtcctcaacctctgcgctcttagtgttgacaggtacagagcagttgcctcctggagtcgtgttcagggaattgggattcctttggtaactgccattgaaattgtctccatctggatcctgtcctttatcctggccattcctgaagcgattggcttcgtcatggtaccctttgaatataggggtgaacagcataaaacctgtatgctcaatgccacatcaaaattcatggagttctaccaagatgtaaaggactggtggctcttcgggttctatttctgtatgcccttggtgtgcactgcgatcttctacaccctcatgacttgtgagatgttgaacagaaggaatggcagcttgagaattgccctcagtgaacatcttaagcagcgtcgagaagtggcaaaaacagttttctgcttggttgtaatttttgctctttgctggttccctcttcacttaagccgtatattgaagaaaactgtgtataacgaaatggacaagaaccgatgtgaattacttagtttcttactgctcatggattacatcggtattaacttggcaaccatgaattcatgtataaaccccatagctctgtattttgtgagcaagaaatttaaaaattgtttccagtcatgcctctgctgctgctgttaccagtccaaaagtctgatgacctcggtccccatgaacggaacaagcatccagtggaagaaccacgatcaaaacaaccacaacacagaccggagcagccataaggacagcatgaactgaccacccttagaagcactcctcggtactcccataatcctctcggagaaaaaaatcacaaggcaactgtgactccgggaatctcttctctgatccttcttccttaattcactcccacacccaagaagaaatgctttccaaaaccgcaaggtagactggtttatccacccacaacatctacgaatcgtacttctttaattgatctaatttacatattctgcgtgttgtattcagcactaaaaaatggtgggagctgggggagaatgaagactgttaaatgaaaccagaaggatatttactacttttgcatgaaaatagagctttcaagtacatggctagcttttatggcagttctggtgaatgttcaatgggaactggtcaccatgaaactttagagattaacgacaagattttctactttttttaagtgattttttgtccttcagccaaacacaatatgggctcaggtcacttttatttgaaatgtcatttggtgccagtattttttaactgcataatagcctaacatgattatttgaacttatttacacatagtttgaaaaaaaaaagacaaaaatagtattcaggtgagcaattagattagtattttccacgtcactatttatttttttaaaacacaaattctaaagctacaacaaatactacaggcccttaaagcacagtctgatgacacatttggcagtttaatagatgttactcaaagaattttttaagaactgtattttattttttaaatggtgttttattacaagggaccttgaacatgttttgtatgttaaattcaaaagtaatgcttcaatcagatagttctttttcacaagttcaatactgtttttcatgtaaattttgtatgaaaaatcaatgtcaagtaccaaaatgttaatgtatgtgtcatttaactctgcctgagactttcagtgcactgtatatagaagtctaaaacacacctaagagaaaaagatcgaatttttcagatgattcggaaattttcattcaggtatttgtaatagtgacatatatatgtatatacatatcacctcctattctcttaatttttgttaaaatgttaactggcagtaagtcttttttgatcattcccttttccatataggaaacataattttgaagtggccagatgagtttatcatgtcagtgaaaaataattacccacaaatgccaccagtaacttaacgattcttcacttcttggggttttcagtatgaacctaactccccaccccaacatctccctcccacattgtcaccatttcaaagggcccacagtgacttttgctgggcattttcccagatgtttacagactgtgagtacagcagaaaatcttttactagtgtgtgtgtgtatatatataaacaattgtaaatttcttttagcccatttttctagactgtctctgtggaatatatttgtgtgtgtgatatatgcatgtgtgtgatggtatgtatggatttaatctaatctaataattgtgccccgcagttgtgccaaagtgcatagtctgagctaaaatctaggtgattgttcatcatgacaacctgcctcagtccattttaacctgtagcaaccttctgcattcataaatcttgtaatcatgttaccattacaaatgggatataagaggcagcgtgaaagcagatgagctgtggactagcaatatagggttttgtttggttggttggtttgataaagcagtatttggggtcatattgtttcctgtgctggagcaaaagtcattacactttgaagtattatattgttcttatcctcaattcaatgtggtgatgaaattgccaggttgtctgatatttctttcagacttcgccagacagattgctgataataaattaggtaagataatttgttgggccatattttaggacaggtaaaataacatcaggttccagttgcttgaattgcaaggctaagaagtactgcccttttgtgtgttagcagtcaaatctattattccactggcgcatcatatgcagtgatatatgcctataatataagccataggttcacaccattttgtttagacaattgtctttttttcaagatgctttgtttctttcatatgaaaaaaatgcattttataaattcagaaagtcatagatttctgaaggcgtcaacgtgcattttatttatggactggtaagtaactgtggtttactagcaggaatatttccaatttctacctttactacatcttttcaacaagtaactttgtagaaatgagccagaagccaaggccctgagttggcagtggcccataagtgtaaaataaaagtttacagaaacctt

SEQ ID NO: 230 - DNA, 240 bp, Homo sapiens
  3' terminal sequence. growth factor receptor-bound protein 2 (GRB2) gene.
  modified_base (33): a, t, c or g
  modified_base (130): a, t, c or g
ggtttcttgttttttattattggcgtcagtagngactatacgtggccttaaacgtcatgcactgatggacagaagagaaaaaaggatgaaaaaaaagacaaaggaggggaaagaggagcagcagtgaaantttgtaataaaaactcttcttaatttataggtaagttttggcatttttaaatccaacgccccctcccaccccctaaagttccaaccaaagtgagagggtcacagggtgac

SEQ ID NO: 231 - DNA, 475 bp, Homo sapiens
  5' terminal sequence. growth factor receptor-bound protein 2 (GRB2) gene.
  modified_base (406): a, t, c or g
  modified_base (411): a, t, c or g
  modified_base (453): a, t, c or g
  modified_base (460): a, t, c or g
  modified_base (473): a, t, c or g
cttaatggaaaagacggcttcattcccaagaactacatagaaatgaaaccacatccgtggttttttggcaaaatccccagagccaaggcagaagaaatgcttagcaaacagcggcacgatggggcctttcttatccgagagagtgagagcgctcctggggacttctccctctctgtcaagtttggaaacgatgtgcagcacttcaaggtgctccgagatggagccgggaagtacttcctctgggtggtgaagttcaattctttgaatgagctggtggattatcacagatctacatctgtctccagaaaccagcagatattcctgcggggacattaggaacaggtgccacagcaggccgacatacgttccaggggcctttttttgatttttgattccccaggggggnttggngaggttgggttttccgccgggggagattttattccatgttcntgggttnaatttaggaaccntt

SEQ ID NO: 232 - DNA, 1109 bp, Homo sapiens
  growth factor receptor-bound protein 2 (GRB2) gene.
gccagtgaattcgggggctcagccctcctccctcccttccccctgcttcaggctgctgagcactgagcagcgctcagaatggaagccatcgccaaatatgacttcaaagctactgcagacgacgagctgagcttcaaaaggggggacatcctcaaggttttgaacgaagaatgtgatcagaactggtacaaggcagagcttaatggaaaagacggcttcattcccaagaactacatagaaatgaaaccacatccgtggttttttggcaaaatccccagagccaaggcagaagaaatgcttagcaaacagcggcacgatggggcctttcttatccgagagagtgagagcgctcctggggacttctccctctctgtcaagtttggaaacgatgtgcagcacttcaaggtgctccgagatggagccgggaagtacttcctctgggtggtgaagttcaattctttgaatgagctggtggattatcacagatctacatctgtctccagaaaccagcagatattcctgcgggacatagaacaggtgccacagcagccgacatacgtccaggccctctttgactttgatccccaggaggatggagagctgggcttccgccggggagattttatccatgtcatggataactcagaccccaactggtggaaaggagcttgccacgggcagaccggcatgtttccccgcaattatgtcacccccgtgaaccggaacgtctaagagtcaagaagcaattatttaaagaaagtgaaaaatgtaaaacacatacaaaagaattaaacccacaagctgcctctgacagcagcctgtgagggagtgcagaacacctggccgggtcaccctgtgaccctctcactttggttggaactttagggggtgggagggggcgttggatttaaaaatgccaaaacttacctataaattaagaagagtttttattacaaattttcactgctgctcctctttcccctcctttgtcttttttttcatccttttttctcttctgtccatcagtgcatgacgtttaaggccacgtatagtcctagctgacgccaataataaaaaacaagaaaccaaaaaaaaaaaacccgaattca

SEQ ID NO: 233 - DNA, 446 bp, Homo sapiens
  3' terminal sequence. jun d proto-oncogene (JUND) gene.
  modified_base (18): a, t, c or g
  modified_base (19): a, t, c or g
  modified_base (21): a, t, c or g
  modified_base (365): a, t, c or g
cgcgcgtctcggctgccnngntgtacaccgcgccggaaagtggggctccgagggggcgcactcaaaaccctgcctttcctttacttttacttttttttttttttctttggaagagagaagaacagagtgttcgattctgccctatttatgtttctactcgggaacaaacgttggttgtgtgtgtgtgtgttttcttgtgttggttttttaaagaaatgggaagaagaaaaaaaaattctccgcccctttcctcgatctcgctccccccttcggttctttcgaccgggtcccccctccctttttttgttctgttttgttttgttttgctacgagtccacattcctgtttgtaatccttgggttcgnccggttttctgttttcagtaaagtctcgttacggcaaaacctcgtgccgaatttttggggctcgaggggcaaaatttccca

SEQ ID NO: 234 - DNA, 1891 bp, Homo sapiens
  jun d proto-oncogene (JUND) gene.
ccgaggctataagagggcgcacaagtggcgcggcgcaggagccgccgccagtggagggccgggcgctgcggccgcggccggggcgggcgcagggccgagcggacgggggggcgcgggccccccgggaggccgcggccactcccccccgggccggcgcggcgggggaggcggaggatggaaacacccttctacggcgatgaggcgctgagcggcctgggcggcggcgccagtggcagcggcggcacgttcgcgtccccgggccgcttgttccccggggcgcccccgacggccgcggccggcagcatgatgaagaaggacgcgctgacgctgagcctgagtgagcaggtggcggcagcgctcaagcctgcgcccgcgcccgcctcctacccccctgccgccgacggcgcccccagcgcggcaccccccgacggcctgctcgcctctcccgacctggggctgctgaagctggcctcccccgagctcgagcgcctcatcatccagtccaacgggctggtcaccaccacgccgacgagctcacagttcctctaccccaaggtggcggccagcgaggagcaggagttcgccgagggcttcgtcaaggccctggaggatttacacaagcagaaccagctcggcgcgggccgggccgctgccgccgccgccgccgccgccggggggccctcgggcacggccacgggctccgcgccccccggcgagctggccccggcggcggccgcgcccgaagcgcctgtctacgcgaacctgagcagctacgcgggcggcgccgggggcgcggggggcgccgcgacggtcgccttcgctgccgaacctgtgcccttcccgccgccgccacccccaggcgcgttggggccgccgcgcctggctgcgctcaaggacgagccacagacggtgcccgacgtgccgagcttcggcgagagcccgccgttgtcgcccatcgacatggacacgcaggagcgcatcaaggcggagcgcaagcggctgcgcaaccgcatcgccgcctccaagtgccgcaagcgcaagctggagcgcatctcgcgcctggaagagaaagtgaagaccctcaagagtcagaacacggagctggcgtccacggcgagcctgctgcgcgagcaggtggcgcagctcaagcagaaagtcctcagccacgtcaacagcggctgccagctgctgccccagcaccaggtcccggcgtactgagtcgggcatggcggccacctccaaggggcgggctcgcgggggggtgtcgtgggcgccccggacttggagagggtgcggccctccacccccccctccccgagtgtgcccaggaactcagagaggcgcggccccggggattcccccccgaggtgcccaggactcggaaggggcgccccggactcgacaagctggaccccctgctcccgggggcgagcgcatgacccccccgccctcgcgctgcctctttcccccgcgcggccgccccgtgttgcacaaacccgcgcgtctcggctgcccctttgtacaccgcgccgcaagggggctccgagggggcgcacgtcaaaccctgcctttcctttacttttactttttttttttctttggaagagagaagaacagagtgttcgattctgccctatttatgtttctactcggggaacaaacgttggttgtgtgtgtgtgtgttttcttgtgttggttttttaaagaaatgggaagaagaaaaaaaaattctccgcccctttcctcgatctcgctcccccttcggtctttcgaccgtccccccctcccctttttttgttctgttttgttttgttttgctacgagtccacattcctgtttgtaatccttggttcgcccggttttctgttttcagtaaagtctcgttacgcca

SEQ ID NO: 235 - DNA, 421 bp, Homo sapiens
  3' terminal sequence. swi/snf related, matrix associated, actin dependent regulator of chromatin, subfamily a, member 2 (SMARCA2) gene.
  modified_base (237): a, t, c or g
  modified_base (373): a, t, c or g
  modified_base (389): a, t, c or g
  modified_base (399): a, t, c or g
accaaaagtcttcaagccacgagcggagggcattcctgcaggccatcttggagcatgaggaggaaaatgaggaagaagatgaagtaccggacgatgagactctgaaccaaatgattgctcgacgagaagaagaatttgacctttttatgcggatggacatggaccggcggagggaagatgcccggaacccgaaacggaagccccgtttaatggaggaggatgagctgccctcctggntcattaaggatgacgctgaagtagaaaggctcacctgtgaagaagaggaggagaaaatatttgggagggggtcccgccagcgccgtgacgtggactacagtgacgccctcacggagaagcagtggctaaagggccntcgaagacggcatttnggaggaattngaagaggaatacggttaagaag

SEQ ID NO: 236 - DNA, 438 bp, Homo sapiens
  5' terminal sequence. swi/snf related, matrix associated, actin dependent regulator of chromatin, subfamily a, member 2 (SMARCA2) gene.
  modified_base (402): a, t, c or g
  modified_base (406): a, t, c or g
tggcaattttctgccgggcactcttaaacactgactgtaagacgatggagtcttcatagatctgggatccctccaggttgaacgtctgagcgttgtgacagagaagcatgacatccttctccaggtcgcctaggctccggtacttatgattacgaatcctttcctttatttttttgaaatccactggcttcctaattaattcatagtattctggtaattctttccttgaaggtaactgaatgaagacttcactgagctgtcgccctgaactgtttccttctatttccaactgagaattactgggcaccttctccacgttacacctatctttgtagtttatcacagtattcgatgattagcgttcatctggctttgtcagtttgggggggatttggtgacagntttntcagcgggagggcggcctcttctcttcttagg

SEQ ID NO: 237 - DNA, 5257 bp, Homo sapiens
  swi/snf related, matrix associated, actin dependent regulator of chromatin, subfamily a, member 2 (SMARCA2) gene.
aaaaattttctgttaccaaattttacaacttctaataagactactataactttatgtaaactgatgaagatgtgctgattaacatattctgtgatatggtttacaacttttaatcataattgtccatgattttggaatgctgttatttatcagtaaatgtaaaatatttgaggcatttagccatacacacactagaactttttaaaactttgtcctatagtgtaattataaactgatgactattatcttcatacattgagtcttcatgcatcaatgaaatgaaaaatataggagtagatgtccacgcccacagaccctggtgcgatgccccacccagggccttcgccggggcctgggccttcccctgggccaattcttgggcctagtccaggaccaggaccatccccaggttccgtccacagcatgatggggccaagtcctggacctccaagtgtctcccatcctatgccgacgatggggtccacagacttcccacaggaaggcatgcatcaaatgcataagcccatcgatggtatacatgacaaggggattgtagaagacatccattgtggatccatgaagggcactggtatgcgaccacctcacccaggcatgggccctccccagagtccaatggatcaacacagccaaggttatatgtcaccacacccatctccattaggagccccagagcacgtctccagccctatgtctggaggaggcccaactccacctcagatgccaccaagccagccgggggccctcatcccaggtgatccgcaggccatgagccagcccaacagaggtccctcacctttcagtcctgtccagctgcatcagcttcgagctcagattttagcttataaaatgctggcccgaggccagcccctccccgaaacgctgcagcttgcagtccaggggaaaaggacgttgcctggcttgcagcaacaacagcagcagcaacagcagcagcagcagcagcagcagcagcagcagcagcagcaacagcagccgcagcagcagccgccgcaaccacagacgcagcaacaacagcagccggcccttgttaactacaacagaccatctggcccggggccggagctgagcggcccgagcaccccgcagaagctgccggtgcccgcgcccggcggccggccctcgcccgcgccccccgcagccgcgcagccgcccgcggccgcagtgcccgggccctcagtgccgcagccggccccggggcagccctcgcccgtcctccagctgcagcagaagcagagccgcatcagccccatccagaaaccgcaaggcctggaccccgtggaaattctgcaagagcgggaatacagacttcaggcccgcatagctcataggatacaagaactggaaaatctgcctggctctttgccaccagatttaagaaccaaagcaaccgtggaactaaaagcacttcggttactcaatttccagcgtcagctgagagaggaggtggtggcctgcatgcgcagggacacgaccctggagacggctctcaactccaaagcatacaaacggagcaagcgccagactctgagagaagctcgcatgaccgagaagctggagaagcagcagaagattgagcaggagaggaaacgccgtcagaaacaccaggaatacctgaacagtattttgcaacatgcaaaagattttaaggaatatcatcggtctgtggccggaaagatccagaagctctccaaagcagtggcaacttggcatgccaacactgaaagagagcagaagaaggagacagagcggattgaaaaggagagaatgcggcgactgatggctgaagatgaggagagttatagaaaactgattgatcaaaagaaagacaggcgtttagcttaccttttgcagcagaccgatgagtatgtagccaatctgaccaatctggtttgggagcacaagcaagcccaggcagccaaagagaagaagaagaggaggaggaggaagaagaaggctgaggagaatgcagagggtggggagtctgccctgggaccggatggagagcccatagatgagagcagccagatgagtgacctccctgtcaaagtgactcacacagaaaccggcaaggttctgttcggaccagaagcacccaaagcaagtcagctggacgcctggctggaaatgaatcctggttatgaagttgcccctagatctgacagtgaagagagtgattctgattatgaggaagaggatgaggaagaagagtccagtaggcaggaaaccgaagagaaaatactcctggatccaaatagcgaagaagtttctgagaaggatgctaagcagatcattgagacagctaagcaagacgtggatgatgaatacagcatgcagtacagtgccaggggctcccagtcctactacaccgtggctcatgccatctcggagagggtggagaaacagtctgccctcctaattaatgggaccctaaagcattaccagctccagggcctggaatggatggtttccctgtataataacaacttgaacggaatcttagccgatgaaatggggcttggaaagaccatacagaccattgcactcatcacttatctgatggagcacaaaagactcaatggcccctatctcatcattgttcccctttcgactctatctaactggacatatgaatttgacaaatgggctccttctgtggtgaagatttcttacaagggtactcctgccatgcgtcgctcccttgtcccccagctacggagtggcaaattcaatgtcctcttgactacttatgagtatattataaaagacaagcacattcttgcaaagattcggtggaaatacatgatagtggacgaaggccaccgaatgaagaatcaccactgcaagctgactcaggtcttgaacactcactatgtggcccccagaaggatcctcttgactgggaccccgctgcagaataagctccctgaactctgggccctcctcaacttcctcctcccaacaatttttaagagctgcagcacatttgaacaatggttcaatgctccatttgccatgactggtgaaagggtggacttaaatgaagaagaaactatattgatcatcaggcgtctacataaggtgttaagaccatttttactaaggagactgaagaaagaagttgaatcccagcttcccgaaaaagtggaatatgtgatcaagtgtgacatgtcagctctgcagaagattctgtatcgccatatgcaagccaaggggatccttctcacagatggttctgagaaagataagaaggggaaaggaggtgctaagacacttatgaacactattatgcagttgagaaaaatctgcaaccacccatatatgtttcagcacattgaggaatcctttgctgaacacctaggctattcaaatggggtcatcaatggggctgaactgtatcgggcctcagggaagtttgagctgcttgatcgtattctgccaaaattgagagcgactaatcaccgagtgctgcttttctgccagatgacatctctcatgaccatcatggaggattattttgcttttcggaacttcctttacctacgccttgatggcaccaccaagtctgaagatcgtgctgctttgctgaagaaattcaatgaacctggatcccagtatttcattttcttgctgagcacaagagctggtggcctgggcttaaatcttcaggcagctcatacagtggtcatctttgacagcgactggaatcctcatcaggatctgcaggcccaagaccgagctcaccgcatcgggcagcagaacgaggtccgggtactgaggctctgtaccgtgaacagcgtggaggaaaagatcctcgcggccgcaaaatacaagctgaacgtggatcagaaagtgatccaggcgggcatgtttgaccaaaagtcttcaagccacgagcggagggcattcctgcaggccatcttggagcatgaagaggaaaatgaggaagaagatgaagtaccggacgatgagactctgaaccaaatgattgctcgacgagaagaagaatttgacctttttatgcggatggacatggaccggcggagggaagatgcccggaacccgaaacggaagccccgtttaatggaggaggatgagctgccctcctggatcattaaggatgacgctgaagtagaaaggctcacctgtgaagaagaggaggagaaaatatttgggagggggtcccgccagcgccgtgacgtggactacagtgacgccctcacggagaagcagtggctaagggccatcgaagacggcaatttggaggaaatggaagaggaagtacggcttaagaagcgaaaaagacgaagaaatgtggataaagatcctgcaaaagaagatgtggaaaaagctaagaagagaagaggccgccctcccgctgagaaactgtcaccaaatccccccaaactgacaaagcagatgaacgctatcatcgatactgtgataaactacaaagatagttcagggcgacagctcagtgaagtcttcattcagttaccttcaaggaaagaattaccagaatactatgaattaattaggaagccagtggatttcaaaaaaataaaggaaaggattcgtaatcataagtaccggagcctaggcgacctggagaaggatgtcatgcttctctgtcacaacgctcagacgttcaacctggagggatcccagatctatgaagactccatcgtcttacagtcagtgtttaagagtgcccggcagaaaattgccaaagaggaagagagtgaggatgaaagcaatgaagaggaggaagaggaagatgaagaagagtcagagtccgaggcaaaatcagtcaaggtgaaaattaagctcaataaaaaagatgacaaaggccgggacaaagggaaaggcaagaaaaggccaaatcgaggaaaagccaaacctgtagtgagcgattttgacagcgatgaggagcaggatgaacgtgaacagtcagaaggaagtgggacggatgatgagtgatcagtatggacctttttccttggtagaactgaattccttcctcccctgtctcatttctacccagtgagttcatttgtcatataggcactgggttgtttctatatcatcatcgtctataaactagctttaggatagtgccagacaaacatatgatatcatggtgtaaaaaacacacacatacacaaatatttgtgaccaaatgggcctcaaagattcagattgaaacaaacaaaaagctttt

SEQ ID NO: 238 - DNA, 507 bp, Homo sapiens
  3' terminal sequence. protein phosphatase 2 (formerly 2a), regulatory subunit b (pr 52), gamma isoform (PPP2R2C) gene.
  modified_base (170): a, t, c or g
  modified_base (172): a, t, c or g
  modified_base (324): a, t, c or g
  modified_base (480): a, t, c or g
  modified_base (494): a, t, c or g
tacatgctcacccgggactaccttacagtctatggatgggacctgaacatggaggcaagacccatagagacctaccaggtccatgactaccttcggagcaagctctgttccctgtacgagaacgactgcattttcgacaagtttgaatgtgcctggaacgggagcgacantncatcatgaccggggcctacaacaacttcttccgcatgttcgatcggaacaccaagcgggacgtgaccctgggaggcctcgagggaaagcagcaagccccgggctgtgctcaagccacggcgcgtgtgcgtgggggggcaagcgccggcgtgnatgacatcagtgtgggacagcttgggacttcaccaagaagatcctgcacacggcctggcacccggctgaggaacatcatttgccattcgccgccaccaacaacctgttacatctttccaggggcaaggtaaatttttgacattgcattaggtattntgcaatttcccggnccttgccaaccca

SEQ ID NO: 239 - DNA, 521 bp, Homo sapiens
  5' terminal sequence. protein phosphatase 2 (formerly 2a), regulatory subunit b (pr 52), gamma isoform (PPP2R2C) gene.
  modified_base (49): a, t, c or g
  modified_base (50): a, t, c or g
  modified_base (374): a, t, c or g
  modified_base (378): a, t, c or g
  modified_base (381): a, t, c or g
  modified_base (384): a, t, c or g
  modified_base (392): a, t, c or g
  modified_base (403): a, t, c or g
  modified_base (423): a, t, c or g
  modified_base (425): a, t, c or g
  modified_base (430): a, t, c or g
  modified_base (432): a, t, c or g
  modified_base (437): a, t, c or g
  modified_base (444): a, t, c or g
  modified_base (447): a, t, c or g
  modified_base (454): a, t, c or g
  modified_base (457): a, t, c or g
  modified_base (471): a, t, c or g
  modified_base (496): a, t, c or g
  modified_base (512): a, t, c or g
taaacagacaattactgccaaacacaattctggcctaggaaagcggggnngggagggggcccaaacttcctgtgtccacacactgccacctctgcagctgtcctcatcagtggtgtgactttcttcccctccttgcattgcggtcgtgaaggtcatgtcggggatgacttgcatgaggctgggtggcaggggccgggaactgcacatacctagtgcatgtcagagtttaccttgtcctggaagatgtacaggttgttggtggcggcgatggcaatgatgttctcagccgggtgccaggccgtgtgcaggatcttcttggtgaagtccaagctgttccaaaatgatgtcatcacgccggcccttgccccccacgnaaanggnccnttggtttnagcaaagcccngggtttgttgcttttccctngnaggcntncaggntcaagtnccntttggtnttncccgatcgaacatncggaagaattttttttaggcccccntcatgatgaacgtgtncgttccctt

SEQ ID NO: 240 - DNA, 350 bp, Homo sapiens
  3' terminal sequence. thrombospondin 3 (THBS3) gene.
  modified_base (11): a, t, c or g
  modified_base (12): a, t, c or g
  modified_base (13): a, t, c or g
  modified_base (17): a, t, c or g
  modified_base (18): a, t, c or g
  modified_base (225): a, t, c or g
  modified_base (279): a, t, c or g
  modified_base (296): a, t, c or g
  modified_base (322): a, t, c or g
cagattcattnnngganntgcctgtgacaattgccccaacgttcccaacaatgaccagaaggacacagatggcaatggggaaggagatgcctgtgacaacgacgtggatggggatggtgcaggcctggggctgaaggggtggctgggggacctgtgagaatttggatcaggtggggatgaagcagggaagctaggaagtctctgtgaaatagggaggcaggcttntggacgttggcctgggtgaggagagattacctgcagcagatgtcaataggaatntgaggtagggcgtagtnttaggcagagtttggactagagggtnagacaagaaacaggcagatttcctggcc

SEQ ID NO: 241 - DNA, 2871 bp, Homo sapiens
  thrombospondin 3 (THBS3) gene.
atggagacgcaggaacttcggggggccctggctcttctcctcctttgctttttcacatctgccagtcaggatctgcaggtaattgacctgctgactgtgggcgagtctcggcagatggtagctgtggcagagaagatccggacagccttgctcactgctggggacatctacctcttatccaccttccgcctgccccccaagcagggtggtgtcctctttggcctctattctcgccaagacaacactcgatggctggaggcctctgttgtaggcaagatcaacaaagtactggtgcgataccagcgggaggatggcaaagtccacgccgtgaacctacagcaagcgggcctggctgatgggcgcacacacacagttctcctgcgactccgaggtccctccagacccagccctgccctacatctctacgtggactgcaaactgggtgaccaacatgcaggccttccagcactggcccccattcctccagcggaggtcgatgggctggagattaggactggacagaaggcgtatttgaggatgcagggctttgtggaatctatgaaaattattctgggtgggtccatggcccgggtaggagccctgagtgagtgtccattccaaggggacgagtccatccacagtgcagtgaccaatgcactgcactccattctaggggagcagaccaaggcgctggtcacccaactcaccctcttcaaccagatcctggtggagctgcgggatgatatacgagaccaggtaaaggaaatgtccctgatccgaaacaccattatggagtgtcaggtgtgcggcttccatgagcagcgttcccactgcagccccaatccctgcttccgaggtgtggactgcatggaagtgtacgagtacccaggctaccgctgtgggccctgcccccctggcctgcagggcaacggcacccactgcagtgacatcaatgagtgtgctcacgctgacccctgtttcccgggctccagctgcatcaacaccatgcccggcttccactgtgaggcctgtcctcgagggtacaagggcacacaggtgtctggtgtgggcattgactatgcccgggccagcaaacaggtctgcaatgacatcgatgaatgcaacgatggcaacaatggtggctgtgacccaaactccatctgcaccaacactgtgggctctttcaagtgtggtccctgccgcctgggtttcctgggcaaccagagccagggctgcctcccagcccggacctgccacagcccagcccacagcccctgccacatccatgctcactgtctctttgaacgcaatggtgcagtgtcctgccagtgtaacgtgggctgggctgggaatgggaacgtgtgtgggactgacacagacatcgatggctacccagaccaagcactgccctgcatggacaacaacaaacactgcaaacaggacaactgccttttgacacccaactctgggcaggaagatgctgataatgatggtgtgggggaccagtgtgatgatgatgctgatggggatgggatcaagaatgttgaggacaactgccggctgttccccaacaaagaccagcagaactcagatacagattcatttggtgatgcctgtgacaattgccccaacgttcccaacaatgaccagaaggacacagatggcaatggggaaggagatgcctgtgacaacgacgtggatggggatggcatccccaatggattggacaattgccctaaagtccccaacccactacagacagacagggatgaggacggggtgggagatgcttgcgacagctgccctgaaatgagcaatcctacccagacagatgcagacagcgacctggtgggggatgtctgtgatactaatgaagacagcgatggggatgggcatcaggacaccaaggacaactgcccacagctgccaaatagctcccagctggactctgataacgatggacttggagatgagtgtgatggggatgatgacaatgatggcatcccagattatgtgcctcctggtcccgataactgccgcctggtacccaatcccaatcagaaggactcagatggcaatggcgttggtgatgtgtgtgaggatgactttgacaatgatgctgtggtcgaccccctggatgtgtgtcctgaaagtgcagaggtaacgcttacggattttcgggcctatcagaccgtcgtcctggatcctgagggtgatgctcagattgacccaaactgggttgtgctcaaccagggcatggaaatcgttcagaccatgaacagtgaccctggcttggcagttggatacacggccttcaatggtgtggactttgaaggcaccttccatgtgaacacagtgactgatgatgactacgcaggctttctcttcagttatcaagacagtggccgcttctacgtagtcatgtggaagcagaccgagcagacctactggcaggctacacccttccgggcggttgcccagcccgggctgcagctcaaggcagtgacatcagtgtctggcccaggtgagcacctccgaaatgccctgtggcatactggccacacccctgatcaggtacgactcctgtggacagacccacgaaatgtgggctggcgggacaagacctcctatcgctggcagcttctgcaccggcctcaagttggctacattcgggtgaagctctatgagggaccccagcttgtggcggattctggggtgatcattgacacatccatgcgaggggggcgtcttggtgtattctgcttctcccaagaaaacataatttggtccaatctccagtatcgatgcaatgacacagtgcctgaggactttgagccattccggaggcagctgctccagggaagggtgtga

SEQ ID NO: 242 - DNA, 509 bp, Homo sapiens
  3' terminal sequence. actin, gamma 1 (ACTG1) gene.
  modified_base (13): a, t, c or g
  modified_base (48): a, t, c or g
  modified_base (96): a, t, c or g
  modified_base (103): a, t, c or g
  modified_base (130): a, t, c or g
  modified_base (137): a, t, c or g
  modified_base (141): a, t, c or g
  modified_base (169): a, t, c or g
  modified_base (240): a, t, c or g
  modified_base (284): a, t, c or g
  modified_base (347): a, t, c or g
  modified_base (366): a, t, c or g
  modified_base (380): a, t, c or g
  modified_base (389): a, t, c or g
  modified_base (415): a, t, c or g
  modified_base (432): a, t, c or g
  modified_base (457): a, t, c or g
  modified_base (472): a, t, c or g
  modified_base (504): a, t, c or g
cacttttattttnccttacacaatgacgtgttgctggggcctaatgtnctcacataacagtagaaaaccaaaatttgttgtcatctcttcaaagantcgaganttgcgtacaaaaaaaaccttacataanttaagantgantacatttacaggcgtaaatgcaaaccgnttccaactcaaagcaagtaacagcccacggtgttctggccaaagacatcagctaagaaaggaaactggggncctacggcttgggactttccaaccctggacaggacccgcaaggncaaaacaactgggttcttgccagcctctaggaggaattcccggaacactcaggccctggacangtttaataccaggggggancagttaactttcantacaggggncaaaatcaggcaacagtttttaccantccagtggctggtttcnggttacaggtttcaggggcattttnttttcggaggggttnttcccgtttcgtgagggtaggctgagggtttntgctt

SEQ ID NO: 243 - DNA, 393 bp, Homo sapiens
  5' terminal sequence. actin, gamma 1 (ACTG1) gene.
  modified_base (341): a, t, c or g
  modified_base (351): a, t, c or g
  modified_base (376): a, t, c or g
gatcaccgccctggccccagcaccatgaagatcaagatcatcgcacccccagagcgcaagtactcggtgtggatcggtggctccatcctggcctcactgtccaccttccagcagatgtggattagcaagcaggagtacgacgagtcgggcccctccatcgtccaccgcaaatgcttctaaacggactcagcagatgcgtagattttgctgcatgggttaattgagaatagaaatttgcccctgggaaattgcacacacctcatgctagcctcacgaaactgggaataagcctttcgaaaagaaattgtccttgaagcttgtatctggtatcagcactgggntgttaggaanttgttgctgatttttgaccttgtanttgaagtttaactgttt

SEQ ID NO: 244 - DNA, 1919 bp, Homo sapiens
  actin, gamma 1 (ACTG1) gene.
gtctcagtcgccgctgccagctctcgcactctgttcttccgccgctccgccgtcgcgtttctctgccggtcgcaatggaagaagagatcgccgcgctggtcattgacaatggctccggcatgtgcaaagctggttttgctggggacgacgctccccgagccgtgtttccttccatcgtcgggcgccccagacaccagggcgtcatggtgggcatgggccagaaggactcctacgtgggcgacgaggcccagagcaagcgtggcatcctgaccctgaagtaccccattgagcatggcatcgtcaccaactgggacgacatggagaagatctggcaccacaccttctacaacgagctgcgcgtggccccggaggagcacccagtgctgctgaccgaggcccccctgaaccccaaggccaacagagagaagatgactcagattatgtttgagaccttcaacaccccggccatgtacgtggccatccaggccgtgctgtccctctacgcctctgggcgcaccactggcattgtcatggactctggagacggggtcacccacacggtgcccatctacgagggctacgccctcccccacgccatcctgcgtctggacctggctggccgggacctgaccgactacctcatgaagatcctcactgagcgaggctacagcttcaccaccacggccgagcgggaaatcgtgcgcgacatcaaggagaagctgtgctacgtcgccctggacttcgagcaggagatggccaccgccgcatcctcctcttctctggagaagagctacgagctgcccgatggccaggtcatcaccattggcaatgagcggttccggtgtccggaggcgctgttccagccttccttcctgggtatggaatcttgcggcatccacgagaccaccttcaactccatcatgaagtgtgacgtggacatccgcaaagacctgtacgccaacacggtgctgtcgggcggcaccaccatgtacccgggcattgccgacaggatgcagaaggagatcaccgccctggcgcccagcaccatgaagatcaagatcatcgcacccccagagcgcaagtactcggtgtggatcggtggctccatcctggcctcactgtccaccttccagcagatgtggattagcaagcaggagtacgacgagtcgggcccctccatcgtccaccgcaaatgcttctaaacggactcagcagatgcgtagcatttgctgcatgggttaattgagaatagaaatttgcccctggcaaatgcacacacctcatgctagcctcacgaaactggaataagccttcgaaaagaaattgtccttgaagcttgtatctgatatcagcactggattgtagaacttgttgctgattttgaccttgtattgaagttaactgttccccttggtatttgtttaataccctgtacatatctttgagttcaacctttagtacgtgtggcttggtcacttcgtggctaaggtaagaacgtgcttgtggaagacaagtctgtggcttggtgagtctgtgtggccagcagcctctgatctgtgcagggtattaacgtgtcagggctgagtgttctgggatttctctagaggctggcaagaaccagttgttttgtcttgcgggtctgtcagggttggaaagtccaagccgtaggacccagtttcctttcttagctgatgtctttggccagaacaccgtgggctgttacttgctttgagttggaagcggtttgcatttacgcctgtaaatgtattcattcttaatttatgtaaggttttttttgtacgcaattctcgattctttgaagagatgacaacaaattttggttttctactgttatgtgagaacattaggccccagcaacacgtcattgtgtaaggaaaaataaaagtgctgccgtaacc

SEQ ID NO: 245 - DNA, 467 bp, Homo sapiens
  3' terminal sequence. integrin, alpha 6 (ITGA6) gene.
  modified_base (66): a, t, c or g
  modified_base (203): a, t, c or g
  modified_base (294): a, t, c or g
  modified_base (343): a, t, c or g
  modified_base (396): a, t, c or g
  modified_base (418): a, t, c or g
  modified_base (429): a, t, c or g
  modified_base (434): a, t, c or g
ccgccgccgggcagctgtgcttgctctacctgtcggcggggctcctgtcccggctcggcgcacttncaacttggacactcgggaggacaacgtgatccggaaatatggagaccccgggagcctcttcggcttctcgctggccatgcactggcaactgcagcccgaggacaagcggctgttgctcgtgggggccccgcgggagnaagcgcttccactgcagagagccaacagaacgggagggctgtacagcttgcgacatcaccgcccgggggccatgcacggggatcgagtttnataacgatgcttgaccccacgtcagaaagcaaggaagattagttggatngggggtcaacgtccagagccaaggttcagggggcaaggtcgtgacatgtgttnaccctattgaaaaaaggcagcnttttattacgnagcangatttccgagacatttttgggcgttttttttcc

SEQ ID NO: 246 - DNA, 473 bp, Homo sapiens
  5' terminal sequence. integrin, alpha 6 (ITGA6) gene.
  modified_base (51): a, t, c or g
  modified_base (406): a, t, c or g
  modified_base (436): a, t, c or g
gccctctcccatccatatcgtcttcaatcctgagattctgactcaggacanaacaccgcccaaagatgtctcgggattcctgcttcgtattaacatgctgccttttttcatatcggtgagcacatgtcacgaccttgccccctggaccttggctctggacggtgacccccatccactgatcttccttgctttctgacgtggggtcagcatcgttatcaaactcgatccgcgtgcatggcccccgggcggtggatgtcgcagctgtacagccctcccgttctgttggctctctgcagtgggaagcgcttctgcccgcggggcccccacggagcaacagccgcttgtcctcgggctgcagttgccagtgcatgggccagcgagaaagccgaagaggttccccggggtnttccatattttccggatcaagttgttcctnccgagttttccaagtttgaagggttgcgcaaggccgt

SEQ ID NO: 247 - DNA, 5611 bp, Homo sapiens
  integrin, alpha 6 (ITGA6) gene.
gcgcgaccgtcccgggggtggggccgggcgcagcggcgagaggaggcgaaggtggctgcggtagcagcagcgcggcagcctcggacccagcccggagcgcagggcggccgctgcaggtccccgctcccctccccgtgcgtccgcccatggccgccgccgggcagctgtgcttgctctacctgtcggcggggctcctgtcccggctcggcgcagccttcaacttggacactcgggaggacaacgtgatccggaaatatggagaccccgggagcctcttcggcttctcgctggccatgcactggcaactgcagcccgaggacaagcggctgttgctcgtgggggccccgcgcggagaagcgcttccactgcagagagccaacagaacgggagggctgtacagctgcgacatcaccgcccgggggccatgcacgcggatcgagtttgataacgatgctgaccccacgtcagaaagcaaggaagatcagtggatgggggtcaccgtccagagccaaggtccagggggcaaggtcgtgacatgtgctcaccgatatgaaaaaaggcagcatgttaatacgaagcaggaatcccgagacatctttgggcggtgttatgtcctgagtcagaatctcaggattgaagacgatatggatgggggagattggagcttttgtgatgggcgattgagaggccatgagaaatttggctcttgccagcaaggtgtagcagctacttttactaaagactttcattacattgtatttggagccccgggtacttataactggaaagggattgttcgtgtagagcaaaagaataacactttttttgacatgaacatctttgaagatgggccttatgaagttggtggagagactgagcatgatgaaagtctcgttcctgttcctgctaacagttacttaggtttttctttggactcagggaaaggtattgtttctaaagatgagatcacttttgtatctggtgctcccagagccaatcacagtggagccgtggttttgctgaagagagacatgaagtctgcacatctcctccctgagcacatattcgatggagaaggtctggcctcttcatttggctatgatgtggcggtggtggacctcaacaaggatgggtggcaagatatagttattggagccccacagtattttgatagagatggagaagttggaggtgcagtgtatgtctacatgaaccagcaaggcagatggaataatgtgaagccaattcgtcttaatggaaccaaagattctatgtttggcattgcagtaaaaaatattggagatattaatcaagatggctacccagatattgcagttggagctccgtatgatgacttgggaaaggtttttatctatcatggatctgcaaatggaataaataccaaaccaacacaggttctcaagggtatatcaccttattttggatattcaattgctggaaacatggaccttgatcgaaattcctaccctgatgttgctgttggttccctctcagattcagtaactattttcagatcccggcctgtgattaatattcagaaaaccatcacagtaactcctaacagaattgacctccgccagaaaacagcgtgtggggcgcctagtgggatatgcctccaggttaaatcctgttttgaatatactgctaaccccgctggttataatccttcaatatcaattgtgggcacacttgaagctgaaaaagaaagaagaaaatctgggctatcctcaagagttcagtttcgaaaccaaggttctgagcccaaatatactcaagaactaactctgaagaggcagaaacagaaagtgtgcatggaggaaaccctgtggctacaggataatatcagagataaactgcgtcccattcccataactgcctcagtggagatccaagagccaagctctcgtaggcgagtgaattcacttccagaagttcttccaattctgaattcagatgaacccaagacagctcatattgatgttcacttcttaaaagagggatgtggagacgacaatgtatgtaacagcaaccttaaactagaatataaattttgcacccgagaaggaaatcaagacaaattttcttatttaccaattcaaaaaggtgtaccagaactagttctaaaagatcagaaggatattgctttagaaataacagtgacaaacagcccttccaacccaaggaatcccacaaaagatggcgatgacgcccatgaggctaaactgattgcaacgtttccagacactttaacctattctgcatatagagaactgagggctttccctgagaaacagttgagttgtgttgccaaccagaatggctcgcaagctgactgtgagctcggaaatccttttaaaagaaattcaaatgtcactttttatttggttttaagtacaactgaagtcacctttgacaccccatatctggatattaatctgaagttagaaacaacaagcaatcaagataatttggctccaattacagctaaagcaaaagtggttattgaactgcttttatcggtctcgggagttgctaaaccttcccaggtgtattttggaggtacagttgttggcgagcaagctatgaaatctgaagatgaagtgggaagtttaatagagtatgaattcagggtaataaacttaggtaaacctcttacaaacctcggcacagcaaccttgaacattcagtggccaaaagaaattagcaatgggaaatggttgctttatttggtgaaagtagaatccaaaggattggaaaaggtaacttgtgagccacaaaaggagataaactccctgaacctaacggagtctcacaactcaagaaagaaacgggaaattactgaaaaacagatagatgataacagaaaattttctttatttgctgaaagaaaataccagactcttaactgtagcgtgaacgtgaactgtgtgaacatcagatgcccgctgcgggggctggacagcaaggcgtctcttattttgcgctcgaggttatggaacagcacatttctagaggaatattccaaactgaactacttggacattctcatgcgagccttcattgatgtgactgctgctgccgaaaatatcaggctgccaaatgcaggcactcaggttcgagtgactgtgtttccctcaaagactgtagctcagtattcgggagtaccttggtggatcatcctagtggctattctcgctgggatcttgatgcttgctttattagtgtttatactatggaagtgtggtttcttcaagagaaataagaaagatcattatgatgccacatatcacaaggctgagatccatgctcagccatctgataaagagaggcttacttctgatgcatagtattgatctacttctgtaattgtgtggattctttaaacgctctaggtacgatgacagtgttccccgataccatgctgtaaggatccggaaagaagagcgagagatcaaagatgaaaagtatattgataaccttgaaaaaaaacagtggatcacaaagtggaacagaaatgaaagctactcatagcgggggcctaaaaaaaaaaaagcttcacagtacccaaactgctttttccaactcagaaattcaatttggatttaaaagcctgctcaatccctgaggactgatttcagagtgactacacacagtacgaacctacagttttaactgtggatattgttacgtagcctaaggctcctgttttgcacagccaaatttaaaactgttggaatggatttttctttaactgccgtaatttaactttctgggttgcctttgtttttggcgtggctgacttacatcatgtgttggggaagggcctgcccagttgcactcaggtgacatcctccagatagtgtagctgaggaggcacctacactcacctgcactaacagagtggccgtcctaacctcgggcctgctgcgcagacgtccatcacgttagctgtcccacatcacaagactatgccattggggtagttgtgtttcaacggaaagtgctgtcttaaactaaatgtgcaatagaaggtgatgttgccatcctaccgtcttttcctgtttcctagctgtgtgaatacctgctcacgtcaaatgcatacaagtttcattctccctttcactaaaaacacacaggtgcaacagacttgaatgctagttatacttatttgtatatggtatttattttttcttttctttacaaaccattttgttattgactaacaggccaaagagtctccagtttacccttcaggttggtttaatcaatcagaattagaattagagcatgggagggtcatcactatgacctaaattatttactgcaaaaagaaaatctttataaatgtaccagagagagttgttttaataacttatctataaactataacctctccttcatgacagcctccaccccacaacccaaaaggtttaagaaatagaattataactgtaaagatgtttatttcaggcattggatattttttactttagaagcctgcataatgtttctggatttacatactgtaacattcaggaattcttggagaagatgggtttattcactgaactctagtgcggtttactcactgctgcaaatactgtatattcaggacttgaaagaaatggtgaatgcctatggaactagtggatccaaactgatccagtataagactactgaatctgctaccaaaacagttaatcagtgagtcgagtgttctattttttgttttgtttcctcccctatctgtattcccaaaaattactttggggctaatttaacaagaactttaaattgtgttttaattgtaaaaatggcagggggtggaattattactctatacattcaacagagactgaatagatatgaaagctgattttttttaattaccatgcttcacaatgttaagttatatggggagcaacagcaaacaggtgctaatttgttttggatatagtataagcagtgtctgtgttttgaaagaatagaacacagtttgtagtgccactgttgttttggggggggctttttttctttttccggaaaatccttaaaccttaagatactaaggacgttgttttggttgtacttggaattcttagtcacaaaatatattttgtttacaaaaatttctgtaaaacaggttataacagtgtttaaagtctcagtttcttgcttggggaacttgtgtccctaatgtgttagattgctagattgctaaggagctgatacttgacagttttttagacctgtgttactaaaaaaaagatgaatgtcggaaaagggtgttgggagggtggtcaacaaagaaacaaagatgttatggtgtttagacttatggttgttaaaaatgtcatctcaagtcaagtcactggtctgtttgcatttgatacatttttgtactaactagcattgtaaaattatttcatgattagaaattacctgtggatatttgtataaaagtgtgaaataaattttttataaaagtgttcattgtttcgtaacacagcattgtatatgtgaagcaaactctaaaattataaatgacaacctgaattatctatttcatcaaaaaaaaaaaaaaaaaaaa

SEQ ID NO: 248 - DNA, 406 bp, Homo sapiens
  3' terminal sequence. rad9 (S. pombe) homolog (RAD9) gene.
  modified_base (67): a, t, c or g
  modified_base (80): a, t, c or g
  modified_base (94): a, t, c or g
  modified_base (130): a, t, c or g
  modified_base (137): a, t, c or g
  modified_base (148): a, t, c or g
  modified_base (152): a, t, c or g
  modified_base (154): a, t, c or g
  modified_base (175): a, t, c or g
  modified_base (183): a, t, c or g
  modified_base (216): a, t, c or g
  modified_base (233): a, t, c or g
  modified_base (255): a, t, c or g
  modified_base (268): a, t, c or g
  modified_base (281): a, t, c or g
  modified_base (297): a, t, c or g
  modified_base (299): a, t, c or g
  modified_base (317): a, t, c or g
  modified_base (349): a, t, c or g
  modified_base (367): a, t, c or g
  modified_base (372): a, t, c or g
  modified_base (386): a, t, c or g
cctttattcaagagaccagatgggttgccccaggatccggctgccagaccctgaggccaagcacggntggagacccacgnacctgggcctgccnttgccctgagctgcagcctcggccccaggatcctgntcacagntcaccgcaggncagngncaggaagcagccctgggggantggaacgntgctattgattcattaaaaaaagaaaagaaaantacaccaaggttccatnttccccgtgacaggtgggcctnaggggtcggggtnacccccccccagnatggcagcatgatttntntacaatcaatccatcatntggggcacagggtggttttcgggggctatttnttggctttggcgaaattncgggntggggtaatgggtnggcctccagggttaaggcca

SEQ ID NO: 249 - DNA, 2102 bp, Homo sapiens
  rad9 (S. pombe) homolog (RAD9) gene.
gcgcgggaagggaccccggacccggaggtcgcggagagctgggcagtgttggccgctggcggagcgctggggcagcatgaagtgcctggtcacgggcggcaacgtgaaggtgctcggcaaggccgtccactccctgtcccgcatcggggacgagctctacctggaacccttggaggacgggctctccctccggacggtgaactcctcccgctctgcctatgcctgctttctctttgccccgctcttcttccagcaataccaggcagccacccctggtcaggacctgctgcgctgtaagatcctgatgaagtctttcctgtctgtcttccgctcactggcgatgctggagaagacggtggaaaaatgctgcatctccctgaatggccggagcagccgcctggtggtccagctgcattgcaagttcggggtgcggaagactcacaacctgtccttccaggactgtgagtccctgcaggccgtcttcgacccagcctcgtgcccccacatgctccgcgccccagcacgggttctgggggaggctgttctgcccttctctcctgcactggctgaagtgacgctgggcattggccgtggccgcagggtcatcctgcgcagctaccacgaggaggaggcagacagcactgccaaagccatggtgactgagatgtgccttggagaggaggatttccagcagctgcaggcccaggaaggggtggccatcactttctgcctcaaggaattccgggggctcctgagctttgcagagtcagcaaacttgaatcttagcattcattttgatgctccaggcaggcccgccatcttcaccatcaaggactctttgctggacggccactttgtcttggccacactctcagacaccgactcgcactcccaggacctgggctccccagagcgtcaccagccagtgcctcagctccaggctcacagcacaccccacccggacgactttgccaatgacgacattgactcttacatgatcgccatggaaaccactataggcaatgagggctcgcgggtgctgccctccatttccctttcacctggcccccagccccccaagagccccggtccccactccgaggaggaagatgaggctgagcccagtacagtgcctgggactcccccacccaagaagttccgctcactgttcttcggctccatcctggcccctgtacgctccccccagggccccagccctgtgctggcggaagacagtgagggtgaaggctgaaccaagaacctgaagcctgtacccagaggccttggactagacgaagccccagccagtggcagaactgggtctctcagccctggggatcagaaaggtgggcttgctggagctgagctgtttcactgcctctcgcaggccccagctggctgtcactgtaaagctgtcccacagcggtcgggcctgggccgttatctccccacaacccccagccaatcaggactttccagacttggccctgaactactgacgttcctacctcttatttctcattgagcctcaggctatactccagctggccaaggctggaaacctgtctccctcaggctcaccttcctaaggaaaatgtcatagtaggtgctgctggcccctggtgatccagcttctctgccaatcatgacctgttccttcctgaagtcctgggcatgcatctgggacccccgtggagctgacaagttttccttgctttcctgatactctttggcgctgacttggaattctaagagccttggacccgagtgtgtggctagggttgccctggctggggcccggtgccgagactcccaagcggctctgtgcagaagagctgccaggcagtgtcttagatgtgagacggaggccatggcgagaatccagctttgacctttattcaagagaccagatgggttgccccaggatccggctgccagccctgaggccaagcacggctggagacccacgacctggcctgccgttgccctgagctgcagcctcggccccaggatcctgctcacagtcaccgcaggtgcaggcaggaagcagccctgggggactggacgctgctattgattcattaaaaaaagaaaagaaaaat

SEQ ID NO: 250 - DNA, 365 bp, Homo sapiens
  3' terminal sequence. activating transcription factor 3 (ATF3) gene.
  modified_base (56): a, t, c or g
  modified_base (293): a, t, c or g
  modified_base (321): a, t, c or g
  modified_base (330): a, t, c or g
  modified_base (336): a, t, c or g
tccaatatttattattctgacaggttaggaatactaggataaataagtaatatttnctcttacagaaaattgtaatgataccattgagtacaattaaacactctgagaatttcacagaaacatcagaattttaatagacagtagccagcgtccttgtggccagtgtgagtgacttctcacagctgcaaacaccctgggccagatttcttaaaacagctacatgacaaaaacaatgctattgacatccaataatgctaaagcctgggtaccacccgggtcccactgactgtggnttccaaacatctctccactgactgtggntttcaaccncaaggnaagggaaatgggatattccttgggctctt

SEQ ID NO: 251 - DNA, 453 bp, Homo sapiens
  5' terminal sequence. activating transcription factor 3 (ATF3) gene.
  modified_base (355): a, t, c or g
  modified_base (394): a, t, c or g
cgtggctaccattgtcactcgtaggggatgtggagtgagaacagcatttagtgaagttgtgcaacggccagggttgtgctttctagcaaatatgctgttatgtccagaaattgtgtgtgcaagaaaactaggcaatgtactcttccgatgtttgtgtcacacaacactgatgtgacttttatatgctttttctcagatctggtttctaagagttttggcgcgggcggggctgtcaccacgtgcagtatctcaagatattcaggtgggccagaagagcttgtcagcaagagggagggacagaattctcccaggcgttaacacaaaatccatggggcagtatggatgggcaggtccntctgttggcaaactcagttcccaagtcacagggaagganaggcaggaaagtttcaactttcccaaagggtttaggggcttttccacttcaatgtctta

SEQ ID NO: 252 - DNA, 2056 bp, Homo sapiens
  activating transcription factor 3 (ATF3) gene.
gcagccaggcgcgcactgcacagctctcttctctcgccgccgcccgagcgcacccttcagcccgcgcgccggccgtgagtcctcggtgctcgcccgccggccagacaaacagcccgcccgaccccgtcccgaccctggccgccccgagcggagcctggagcaaaatgatgcttcaacacccaggccaggtctctgcctcggaagtgagtgcttctgccatcgtcccctgcctgtcccctcctgggtcactggtgtttgaggattttgctaacctgacgccctttgtcaaggaagagctgaggtttgccatccagaacaagcacctctgccaccggatgtcctctgcgctggaatcagtcactgtcagcgacagacccctcggggtgtccatcacaaaagccgaggtagcccctgaagaagatgaaaggaaaaagaggcgacgagaaagaaataagattgcagctgcaaagtgccgaaacaagaagaaggagaagacggagtgcctgcagcttcagtattagcagagccacaggccgcctctgtggcatcaccagggtttctctgaagaagagggtctgcattttcctaaacccagtgctgctctcccatctcccatcttcctctcgcagcttgatgagccccggtgtgtcccaggagtcggagaagctggaaagtgtgaatgctgaactgaaggctcagattgaggagctcaagaacgagaagcagcatttgatatacatgctcaaccttcatcggcccacgtgtattgtccgggctcagaatgggaggactccagaagatgagagaaacctctttatccaacagataaaagaaggaacattgcagagctaagcagtcgtggtatgggggcgactggggagtcctcattgaatcctcattttatacccaaaaccctgaagccattggagagctgtcttcctgtgtacctctagaatcccagcagcagagaaccatcaaggcgggagggcctgcagtgattcagcaggcccttcccattctgccccagagtgggtcttggaccagggcaagtgcatctttgcctcaactccaggatttaggccttaacacactggccattcttatgttccagatggcccccagctggtgtcctgcccgcctttcatctggattctacaaaaaaccaggatgcccaccgttagattcaggcagcagtgtctgtacctcgggtgggagggatggggccatctccttcaccgtggctaccattgtcactcgtaggggatgtggagtgagaacagcatttagtgaagttgtgcaacggccagggttgtgctttctagcaaatatgctgttatgtccagaaattgtgtgtgcaagaaaactaggcaatgtactcttccgatgtttgtgtcacacaacactgatgtgacttttatatgctttttctcagatctggtttctaagagttttggggggcggggctgtcaccacgtgcagtatctcaagatattcaggtggccagaagagcttgtcagcaagaggaggaacagaattctcccagcgttaacacaaaatccatgggcagcatgatggcaggtcctctgttgcaaactcagttccaaagtcacaggaagaaagcagaaagttcaacttccaaagggttaggactctccactcaatgtcttaggtcaggagttgtgtctaggctggaagagccaaagaaatattccattttcctttccttgtggttgaaaccacagtcagtggagagatgtttggaacacagtcagtggagctggtggtaccaggtttagcattattggatgtcaaaagcattttttttgtcatgtagctgttttaagaaatctggcccagggtgtttgcagctgtgagaagtcactcacactggccacaaggacgctggctactgtctattaaaattctgatgtttctgtgaaattctcagagtgtttaattgtactcaatggtatcattacaattttctgtaagagaaaatattacttatttatcctagtattcctaacctgtcagaataataaatattgtggtaaaa

SEQ ID NO: 253 - DNA, 502 bp, Homo sapiens
  3' terminal sequence. v-akt murine thymoma viral oncogene homolog 2 (AKT2) gene.
  modified_base (33): a, t, c or g
  modified_base (37): a, t, c or g
  modified_base (38): a, t, c or g
  modified_base (399): a, t, c or g
  modified_base (431): a, t, c or g
  modified_base (470): a, t, c or g
  modified_base (491): a, t, c or g
acatcatctcgtacatgaccacacccagcccantacnntttccacggcccggccatagtcattgtcctccagcacctcaggcgccaggtactccggggtcccacagaaggttttcatggtggccccgtcactgatgccctctttgcagaggccaaagtcagtgatcttgatgtggccatctttgtccagcatgaggttttccagcttgatgtcgcggtataccacgtcccgcgagtgcaagtactcaagagccgagacaatctctgcaccataaaaccgggcccgctcctctgtgaagacacgctcccggggacaggtgggaagaacagctcacccccgttgggcatactccattcacaaaggcacagggcgggtcgtggggtctgggaagggcattantttcaggcggcagttgagggaacggggttgcnggggtgtttctgggagggacccggtttttcggttgattnttttgaggcgattttcatccnttgggcaattt

SEQ ID NO: 254 - DNA, 1715 bp, Homo sapiens
  v-akt murine thymoma viral oncogene homolog 2 (AKT2) gene.
gaattccagcggcggcgccgttgccgctgccgggaaacacaaggaaagggaaccagcgcagcgtggcgatgggcgggggtagagccccgccggagaggctgggcggctgccggtgacagactgtgccctgtccacggtgcctcctgcatgtcctgctgccctgagctgtcccgagctaggtgacagcgtaccacgctgccaccatgaatgaggtgtctgtcatcaaagaaggctggctccacaagcgtggtgaatacatcaagacctggaggccacggtacttcctgctgaagagcgacggctccttcattgggtacaaggagaggcccgaggcccctgatcagactctaccccccttaaacaacttctccgtagcagaatgccagctgatgaagaccgagaggccgcgacccaacacctttgtcatacgctgcctgcagtggaccacagtcatcgagaggaccttccacgtggattctccagacgagagggaggagtggatgcgggccatccagatggtcgccaacagcctcaagcagcgggccccaggcgaggaccccatggactacaagtgtggctcccccagtgactcctccacgactgaggagatggaagtggcggtcagcaaggcacgggctaaagtgaccatgaatgacttcgactatctcaaactccttggcaagggaacctttggcaaagtcatcctggtgcgggagaaggccactggccgctactacgccatgaagatcctgcgaaaggaagtcatcattgccaaggatgaagtcgctcacacagtcaccgagagccgggtcctccagaacaccaggcacccgttcctcactgcgctgaagtatgccttccagacccacgaccgcctgtgctttgtgatggagtatgccaacgggggtgagctgttcttccacctgtcccgggagcgtgtcttcacagaggagcgggcccggttttatggtgcagagattgtctcggctcttgagtacttgcactcgcgggacgtggtataccgcgacatcaagctggaaaacctcatgctggacaaagatggccacatcaagatcactgactttggcctctgcaaagagggcatcagtgacggggccaccatgaaaaccttctgtgggaccccggagtacctggcgcctgaggtgctggaggacaatgactatggccgggccgtggactggtgggggctgggtgtggtcatgtacgagatgatgtgcggccgcctgcccttctacaaccaggaccacgagcgcctcttcgagctcatcctcatggaagagatccgcttcccgcgcacgctcagccccgaggccaagtccctgcttgctgggctgcttaagaaggaccccaagcagaggcttggtggggggcccagcgatgccaaggaggtcatggagcacaggttcttcctcagcatcaactggcaggacgtggtccagaagaagctcctgccacccttcaaacctcaggtcacgtccgaggtcgacacaaggtacttcgatgatgaatttaccgcccagtccatcacaatcacaccccctgaccgctatgacagcctgggcttactggagctggaccagcggacccacttcccccagttctcctactcggccagcatccgcgagtgagcagtctgcccacgcagaggacgcacgctcgctgccatcaccgctgggtggttttttacccctgcc

SEQ ID NO: 255 - DNA, 431 bp, Homo sapiens
  5' terminal sequence. s100 calcium-binding protein, beta (neural) (S100B) gene.
  modified_base (284): a, t, c or g
  modified_base (341): a, t, c or g
  modified_base (402): a, t, c or g
  modified_base (407): a, t, c or g
gagaggatgtctgagctggagaaggccatggtggcctcatcgacgttttccaccaatattctggaagggagggagacaagcacaagctgaagaaatccgaactcaaggagctcatcaacaatgagctttcccatttcttagaggaaatcaaagagcaggaggttgtggacaaagtcatggaaacactggacaatgatggagacggcgaatgtgacttccagggaattcatggcctttgttgccatggttactactgcctgccacgagttctttgaacatgagtnagattaggaaagcagccaaaccttttcctgttaacagaggacggttcatggcaaganaggcaggacaggcaaggggtttgcaggcttagttagggagcttgaggtttttccagccgtnttttnttggttaatttagggaaggtttga

SEQ ID NO: 256 - DNA, 1095 bp, Homo sapiens
  s100 calcium-binding protein, beta (neural) (S100B) gene.
tgccgcccaggacccgcagcagagacgacgcctgcagcaaggagaccaggaaggggtgagacaaggaagaggatgtctgagctggagaaggccatggtggccctcatcgacgttttccaccaatattctggaagggagggagacaagcacaagctgaagaaatccgaactcaaggagctcatcaacaatgagctttcccatttcttagaggaaatcaaagagcaggaggttgtggacaaagtcatggaaacactggacaatgatggagacggcgaatgtgacttccaggaattcatggcctttgttgccatggttactactgcctgccacgagttctttgaacatgagtgagattagaaagcagccaaacctttcctgtaacagagacggtcatgcaagaaagcagacagcaagggcttgcagcctagtaggagctgagctttccagccgtgttgtagctaattaggaagcttgatttgctttgtgattgaaaaattgaaaacctctttccaaaggctgttttaacggcctgcatcattctttctgctatattaggcctgtgtgtaagctgactggccccagggactcttgttaacagtaacttaggagtcaggtctcagtgataaagcgtgcaccgtgcagcccgccatggccgtgtagaccctaacccggagggaaccctgactacagaaattaccccggggcacccttaaaacttccactacctttaaaaaacaaagccttatccagcattatttgaaaacactgctgttctttaaatgcgttcctcatccatgcagataacagctggttggccggtgtggccctgcaagggcgtggtggcttcggcctgcttcccgggatgcgcctgatcaccaggtgaacgctcagcgctggcagcgtcctggaaaaagcaactccatcagaactcgcaatccgagccagctctgggggctccagcgtggcctccgtgacccatgcgattcaagtcgcggctgcaggatccttgcctccaacgtgcctccagcacatgcggcttccgagggcactaccgggggctctgagccaccgcgagggcctgcgttcaataaaaag

SEQ ID NO: 257 - DNA, 542 bp, Homo sapiens
  3' terminal sequence. atp-binding cassette, sub-family b (mdr/tap), member 1 (ABCB1) gene.
  modified_base (503): a, t, c or g
ttttaaaatctactttaattctgttataaaatttataatgcagtttaaactatgatttctctccacttgatgatgtctctcactctgttcctttaattacgaagtctctgaagactctgaacttgactgaggaaatgttaaacagatacctcttcataattctgtaagtgtttgcttttaactttgaataaatgtcatatctaaacaaatattaaaaagtatttaacatctcatacagtcagagttcactggcgctttgttccagcctggacactgaccattgaaaaatagatgcctttctgtgccagcagctgctgatgcgtgccatgctccttgactctgccattctgaaacaccactattaagtctgcattctggatggtggacaggcggtgagcaatcacaatgcaggtgcggccttctctggctatgccagggcttcttggacaaccttttcacctactgtatccagagctgacgtggctcatccaaaagcaaaatantgggctgtctaacaagggcacgagctattgccatgcgtt

SEQ ID NO: 258 - DNA, 4643 bp, Homo sapiens
  atp-binding cassette, sub-family b (mdr/tap), member 1 (ABCB1) gene.
cctactctattcagatattctccagattcctaaagattagagatcatttctcattctcctaggagtactcacttcaggaagcaaccagataaaagagaggtgcaacggaagccagaacattcctcctggaaattcaacctgtttcgcagtttctcgaggaatcagcattcagtcaatccgggccgggagcagtcatctgtggtgaggctgattggctgggcaggaacagcgccggggcgtgggctgagcacagcgcttcgctctctttgccacaggaagcctgagctcattcgagtagcggctcttccaagctcaaagaagcagaggccgctgttcgtttcctttaggtctttccactaaagtcggagtatcttcttccaagatttcacgtcttggtggccgttccaaggagcgcgaggtcgggatggatcttgaaggggaccgcaatggaggagcaaagaagaagaacttttttaaactgaacaataaaagtgaaaaagataagaaggaaaagaaaccaactgtcagtgtattttcaatgtttcgctattcaaattggcttgacaagttgtatatggtggtgggaactttggctgccatcatccatggggctggacttcctctcatgatgctggtgtttggagaaatgacagatatctttgcaaatgcaggaaatttagaagatctgatgtcaaacatcactaatagaagtgatatcaatgatacagggttcttcatgaatctggaggaagacatgaccaggtatgcctattattacagtggaattggtgctggggtgctggttgctgcttacattcaggtttcattttggtgcctggcagctggaagacaaatacacaaaattagaaaacagttttttcatgctataatgcgacaggagataggctggtttgatgtgcacgatgttggggagcttaacacccgacttacagatgatgtctccaagattaatgaaggaattggtgacaaaattggaatgttctttcagtcaatggcaacatttttcactgggtttatagtaggatttacacgtggttggaagctaacccttgtgattttggccatcagtcctgttcttggactgtcagctgctgtctgggcaaagatactatcttcatttactgataaagaactcttagcgtatgcaaaagctggagcagtagctgaagaggtcttggcagcaattagaactgtgattgcatttggaggacaaaagaaagaacttgaaaggtacaacaaaaatttagaagaagctaaaagaattgggataaagaaagctattacagccaatatttctataggtgctgctttcctgctgatctatgcatcttatgctctggccttctggtatgggaccaccttggtcctctcaggggaatattctattggacaagtactcactgtattttctgtattaattggggcttttagtgttggacaggcatctccaagcattgaagcatttgcaaatgcaagaggagcagcttatgaaatcttcaagataattgataataagccaagtattgacagctattcgaagagtgggcacaaaccagataatattaagggaaatttggaattcagaaatgttcacttcagttacccatctcgaaaagaagttaagatcttgaagggtctgaacctgaaggtgcagagtgggcagacggtggccctggttggaaacagtggctgtgggaagagcacaacagtccagctgatgcagaggctctatgaccccacagaggggatggtcagtgttgatggacaggatattaggaccataaatgtaaggtttctacgggaaatcattggtgtggtgagtcaggaacctgtattgtttgccaccacgatagctgaaaacattcgctatggccgtgaaaatgtcaccatggatgagattgagaaagctgtcaaggaagccaatgcctatgactttatcatgaaactgcctcataaatttgacaccctggttggagagagaggggcccagttgagtggtgggcagaagcagaggatcgccattgcacgtgccctggttcgcaaccccaagatcctcctgctggatgaggccacgtcagccttggacacagaaagcgaagcagtggttcaggtggctctggataaggccagaaaaggtcggaccaccattgtgatagctcatcgtttgtctacagttcgtaatgctgacgtcatcgctggtttcgatgatggagtcattgtggagaaaggaaatcatgatgaactcatgaaagagaaaggcatttacttcaaacttgtcacaatgcagacagcaggaaatgaagttgaattagaaaatgcagctgatgaatccaaaagtgaaattgatgccttggaaatgtcttcaaatgattcaagatccagtctaataagaaaaagatcaactcgtaggagtgtccgtggatcacaagcccaagacagaaagcttagtaccaaagaggctctggatgaaagtatacctccagtttccttttggaggattatgaagctaaatttaactgaatggccttattttgttgttggtgtattttgtgccattataaatggaggcctgcaaccagcatttgcaataatattttcaaagattataggggtttttacaagaattgatgatcctgaaacaaaacgacagaatagtaacttgttttcactattgtttctagcccttggaattatttcttttattacatttttccttcagggtttcacatttggcaaagctggagagatcctcaccaagcggctccgatacatggttttccgatccatgctcagacaggatgtgagttggtttgatgaccctaaaaacaccactggagcattgactaccaggctcgccaatgatgctgctcaagttaaaggggctataggttccaggcttgctgtaattacccagaatatagcaaatcttgggacaggaataattatatccttcatctatggttggcaactaacactgttactcttagcaattgtacccatcattgcaatagcaggagttgttgaaatgaaaatgttgtctggacaagcactgaaagataagaaagaactagaaggtgctgggaagatcgctactgaagcaatagaaaacttccgaaccgttgtttctttgactcaggagcagaagtttgaacatatgtatgctcagagtttgcaggtaccatacagaaactctttgaggaaagcacacatctttggaattacattttccttcacccaggcaatgatgtatttttcctatgctggatgtttccggtttggagcctacttggtggcacataaactcatgagctttgaggatgttctgttagtattttcagctgttgtctttggtgccatggccgtggggcaagtcagttcatttgctcctgactatgccaaagccaaaatatcagcagcccacatcatcatgatcattgaaaaaacccctttgattgacagctacagcacggaaggcctaatgccgaacacattggaaggaaatgtcacatttggtgaagttgtattcaactatcccacccgaccggacatcccagtgcttcagggactgagcctggaggtgaagaagggccagacgctggctctggtgggcagcagtggctgtgggaagagcacagtggtccagctcctggagcggttctacgaccccttggcagggaaagtgctgcttgatggcaaagaaataaagcgactgaatgttcagtggctccgagcacacctgggcatcgtgtcccaggagcccatcctgtttgactgcagcattgctgagaacattgcctatggagacaacagccgggtggtgtcacaggaagagattgtgagggcagcaaaggaggccaacatacatgccttcatcgagtcactgcctaataaatatagcactaaagtaggagacaaaggaactcagctctctggtggccagaaacaacgcattgccatagctcgtgcccttgttagacagcctcatattttgcttttggatgaagccacgtcagctctggatacagaaagtgaaaaggttgtccaagaagccctggacaaagccagagaaggccgcacctgcattgtgattgctcaccgcctgtccaccatccagaatgcagacttaatagtggtgtttcagaatggcagagtcaaggagcatggcacgcatcagcagctgctggcacagaaaggcatctatttttcaatggtcagtgtccaggctggaacaaagcgccagtgaactctgactgtatgagatgttaaatactttttaatatttgtttagatatgacatttattcaaagttaaaagcaaacacttacagaattatgaagaggtatctgtttaacatttcctcagtcaagttcagagtcttcagagacttcgtaattaaaggaacagagtgagagacatcatcaagtggagagaaatcatagtttaaactgcattataaattttataacagaattaaagtagattttaaaagataaaatgtgtaattttgtttatattttcccatttggactgtaactgactgccttgctaaaagattatagaagtagcaaaaagtattgaaatgtttgcataaagtgtctataataaaactaaactttcatgtg

SEQ ID NO: 259 - DNA, 486 bp, Homo sapiens
  3' terminal sequence. selectin e (endothelial adhesion molecule 1) (SELE) gene.
  modified_base (296): a, t, c or g
  modified_base (399): a, t, c or g
  modified_base (404): a, t, c or g
  modified_base (417): a, t, c or g
  modified_base (429): a, t, c or g
  modified_base (435): a, t, c or g
  modified_base (447): a, t, c or g
  modified_base (459): a, t, c or g
  modified_base (464): a, t, c or g
caacctttatagtgttatgtcaaataggtctgacataagcttaaataaatatatactttaaaaattataaaatattttaagttataatttaaaattctcaataaaactcaaacacaaaccacactggtatttcacacagctaatttctaatgcagtttacataaatatttacaacacttaaacaatttcaaagaaaataacactgtattccatacatagcctgatcacagtagttgttctctcttatttcccagagtttttctgcccctttaaaaggaacctctggctgttctganccttatcacatctctgttttgactgttgggctttggttggttgccagtggttcggccaggaacttctctgggaaactttttttttcaacactggctagggtanggggngtgtagggggggnggtttggtttcntcacantccctcagggtngggggcgggttnggggnattaccggcggggggttttttc

SEQ ID NO: 260 - DNA, 478 bp, Homo sapiens
  5' terminal sequence. selectin e (endothelial adhesion molecule 1) (SELE) gene.
gcctactatgccagatgcctttatggctgaaaccgcaacacccatcaccacttcaatagatcaaagtccagcaggcaaggacggccttcaactgaaaagactcagtgttccctttcctactctcaggatcaagaaagtgttggctaatgaagggaaaggatattttcttccaagcaaaggtgaagagaccaagactctgaaatctcagaattccttttctaactctcccttgctcgctgtaaaatcttggcacagaaacacaatattttgtggctttctttcttttgcccttcacagtgtttcgacagctgattacacagttcctgtcataaggaatgaataattaattatccagagtttagaggaaaaaaatgactaaaaatattattaacttaaaaaatggacaggtgttggatgcccacaggcaaatgcatgggggggttgtttaatgggtgcaaatccctacttgaatgctctt

SEQ ID NO: 261 - DNA, 3834 bp, Homo sapiens
  selectin e (endothelial adhesion molecule 1) (SELE) gene.
cctgagacagaggcagcagtgatacccacctgagagatcctgtgtttgaacaactgcttcccaaaacggaaagtatttcaagcctaaacctttgggtgaaaagaactcttgaagtcatgattgcttcacagtttctctcagctctcactttggtgcttctcattaaagagagtggagcctggtcttacaacacctccacggaagctatgacttatgatgaggccagtgcttattgtcagcaaaggtacacacacctggttgcaattcaaaacaaagaagagattgagtacctaaactccatattgagctattcaccaagttattactggattggaatcagaaaagtcaacaatgtgtgggtctgggtaggaacccagaaacctctgacagaagaagccaagaactgggctccaggtgaacccaacaataggcaaaaagatgaggactgcgtggagatctacatcaagagagaaaaagatgtgggcatgtggaatgatgagaggtgcagcaagaagaagcttgccctatgctacacagctgcctgtaccaatacatcctgcagtggccacggtgaatgtgtagagaccatcaataattacacttgcaagtgtgaccctggcttcagtggactcaagtgtgagcaaattgtgaactgtacagccctggaatcccctgagcatggaagcctggtttgcagtcacccactgggaaacttcagctacaattcttcctgctctatcagctgtgataggggttacctgccaagcagcatggagaccatgcagtgtatgtcctctggagaatggagtgctcctattccagcctgcaatgtggttgagtgtgatgctgtgacaaatccagccaatgggttcgtggaatgtttccaaaaccctggaagcttcccatggaacacaacctgtacatttgactgtgaagaaggatttgaactaatgggagcccagagccttcagtgtacctcatctgggaattgggacaacgagaagccaacgtgtaaagctgtgacatgcagggccgtccgccagcctcagaatggctctgtgaggtgcagccattcccctgctggagagttcaccttcaaatcatcctgcaacttcacctgtgaggaaggcttcatgttgcagggaccagcccaggttgaatgcaccactcaagggcagtggacacagcaaatcccagtttgtgaagctttccagtgcacagccttgtccaaccccgagcgaggctacatgaattgtcttcctagtgcttctggcagtttccgttatgggtccagctgtgagttctcctgtgagcagggttttgtgttgaagggatccaaaaggctccaatgtggccccacaggggagtgggacaacgagaagcccacatgtgaagctgtgagatgcgatgctgtccaccagcccccgaagggtttggtgaggtgtgctcattcccctattggagaattcacctacaagtcctcttgtgccttcagctgtgaggagggatttgaattatatggatcaactcaacttgagtgcacatctcagggacaatggacagaagaggttccttcctgccaagtggtaaaatgttcaagcctggcagttccgggaaagatcaacatgagctgcagtggggagcccgtgtttggcactgtgtgcaagttcgcctgtcctgaaggatggacgctcaatggctctgcagctcggacatgtggagccacaggacactggtctggcctgctacctacctgtgaagctcccactgagtccaacattcccttggtagctggactttctgctgctggactctccctcctgacattagcaccatttctcctctggcttcggaaatgcttacggaaagcaaagaaatttgttcctgccagcagctgccaaagccttgaatcagacggaagctaccaaaagccttcttacatcctttaagttcaaaagaatcagaaacaggtgcatctggggaactagagggatacactgaagttaacagagacagataactctcctcgggtctctggcccttcttgcctactatgccagatgcctttatggctgaaaccgcaacacccatcaccacttcaatagatcaaagtccagcaggcaaggacggccttcaactgaaaagactcagtgttccctttcctactctcaggatcaagaaagtgttggctaatgaagggaaaggatattttcttccaagcaaaggtgaagagaccaagactctgaaatctcagaattccttttctaactctcccttgctcgctgtaaaatcttggcacagaaacacaatattttgtggctttctttcttttgcccttcacagtgtttcgacagctgattacacagttgctgtcataagaatgaataataattatccagagtttagaggaaaaaaatgactaaaaatattataacttaaaaaaatgacagatgttgaatgcccacaggcaaatgcatggagggttgttaatggtgcaaatcctactgaatgctctgtgcgagggttactatgcacaatttaatcactttcatccctatgggattcagtgcttcttaaagagttcttaaggattgtgatatttttacttgcattgaatatattataatcttccatacttcttcattcaatacaagtgtggtagggacttaaaaaacttgtaaatgctgtcaactatgatatggtaaaagttacttattctagattaccccctcattgtttattaacaaattatgttacatctgttttaaatttatttcaaaaagggaaactattgtcccctagcaaggcatgatgttaaccagaataaagttctgagtgtttttactacagttgttttttgaaaacatggtagaattggagagtaaaaactgaatggaaggtttgtatattgtcagatattttttcagaaatatgtggtttccacgatgaaaaacttccatgaggccaaacgttttgaactaataaaagcataaatgcaaacacacaaaggtataattttatgaatgtctttgttggaaaagaatacagaaagatggatgtgctttgcattcctacaaagatgtttgtcagatgtgatatgtaaacataattcttgtatattatggaagattttaaattcacaatagaaactcaccatgtaaaagagtcatctggtagatttttaacgaatgaagatgtctaatagttattccctatttgttttcttctgtatgttagggtgctctggaagagaggaatgcctgtgtgagcaagcatttatgtttatttataagcagatttaacaattccaaaggaatctccagttttcagttgatcactggcaatgaaaaattctcagtcagtaattgccaaagctgctctagccttgaggagtgtgagaatcaaaactctcctacacttccattaacttagcatgtgttgaaaaaaaaagtttcagagaagttctggctgaacactggcaacgacaaagccaacagtcaaaacagagatgtgataaggatcagaacagcagaggttcttttaaaggggcagaaaaactctgggaaataagagagaacaactactgtgatcaggctatgtatggaatacagtgttattttctttgaaattgtttaagtgttgtaaatatttatgtaaactgcattagaaattagctgtgtgaaataccagtgtggtttgtgtttgagttttattgagaattttaaattataacttaaaatattttataatttttaaagtatatatttatttaagcttatgtcagacctatttgacataacactataaaggttgacaataaatgtgcttatgttt

SEQ ID NO: 262 - DNA, 267 bp, Homo sapiens
  3' terminal sequence. epidermal growth factor (beta-urogastrone) (EGF) gene.
  modified_base (208): a, t, c or g
  modified_base (241): a, t, c or g
gtttatgtttttggtgattttatttaaataattagaagaaattcatcgttgtctataatgaaaacaaatcaggcaatttacttacaatcttgtaactgaaaatacatacaaattctgtgcaatcacaccaagagggaaaattctgtaggggaaaaggacagtaatgactaagaaactccgaagcctcctgtgtaatattttaaaatanaatgttttcattcaaatattttaaaaaataagnatctaatctgaaaaaatcagtttcta

SEQ ID NO: 263 - DNA, 383 bp, Homo sapiens
  5' terminal sequence. protein kinase c substrate 80k-h (PRKCSH) gene.
  modified_base (50): a, t, c or g
  modified_base (62): a, t, c or g
  modified_base (178): a, t, c or g
  modified_base (186): a, t, c or g
  modified_base (213): a, t, c or g
  modified_base (278): a, t, c or g
  modified_base (294): a, t, c or g
  modified_base (299): a, t, c or g
  modified_base (372): a, t, c or g
ggagtccgaggtgcagggggagcagcccaagccggccagccctgctgagngaagacaaaatnccgccctacgacgagcagacgcaggccttcatcgatgctgcccaggaggcccgcaacaagttcgaggaggccgagcggtcgctgaaggacatggaggagtccatcaggaacctggnagcaaganatttcttttgactttggccccaacggnagttttgcttacctgtacagccagtgctacgagctcaccaccaacgaatacgtctaccgcctctnccccttcaagcttgtnttcgnagaaacccaaactcgggggctctcccaccagccttggcacctgggggcttcatgggattgggccccgaccacnacaatttcagt

SEQ ID NO: 264 - DNA, 2056 bp, Homo sapiens
  protein kinase c substrate 80k-h (PRKCSH) gene.
ggaaccgcggctgctggacaagaggggtgcggtggatactgacctttgctccggcctcgtcgtgaagacacagcgcatctccccgctgtaggcttctcccacagaacccgtttcgggcctcagagcgtctggtgagatgctgttgccgctgctgctgctgctacccatgtgctgggccgtggaggtcaagaggccccggggcgtctccctcaccaatcatcacttctacgatgagtccaagcctttcacctgcctggacggttcggccaccatcccatttgatcaggtcaacgatgactattgcgactgcaaagatggctctgacgagccaggcacggctgcctgtcctaatggcagcttccactgcaccaacactggctataagcccctgtatatcccctccaaccgggtcaacgatggtgtttgtgactgctgcgatggaacagacgagtacaacagcggcgtcatctgtgagaacacctgcaaagagaagggccgtaaggagagagagtccctgcagcagatggccgaggtcacccgcgaagggttccgtctgaagaagatccttattgaggactggaagaaggcacgggaggagaagcagaaaaagctcattgagctacaggctgggaagaagtctctggaagaccaggtggagatgctgcggacagtgaaggaggaagctgagaagccagagagagaggccaaagagcagcaccagaagctgtgggaagagcagctggctgctgccaaggcccaacaggagcaggagctggcggctgatgccttcaaggagctggatgatgacatggacgggacggtctcggtgactgagctgcagactcacccggagctggacacagatggggatggggcgttgtcagaagcggaagctcaggccctcctcagtggggacacacagacagacgccacctctttctacgaccgcgtctgggccgccatcagggacaagtaccggtccgaggcactgcccaccgaccttccagcaccttctgcccctgacttgacggagcccaaggaggagcagccgccagtgccctcgtcgcccacagaggaggaggaggaggaggaggaggaggaagaagaggctgaagaagaggaggaggaggaggattccgaggaggccccaccgccactgtcacccccgcagccggccagccctgctgaggaagacaaaatgccgccctacgacgagcagacgcaggccttcatcgatgctgcccaggaggcccgcaacaagttcgaggaggccgagcggtcgctgaaggacatggaggagtccatcaggaacctggagcaagagatttcttttgactttggccccaacggggagtttgcttacctgtacagccagtgctacgagctcaccaccaacgaatacgtctaccgcctctgccccttcaagcttgtctcgcagaaacccaaactcgggggctctcccaccagccttggcacctggggctcatggattggccccgaccacgacaagttcagtgccatgaagtatgagcaaggcacgggctgctggcagggccccaaccgctccaccaccgtgcgcctcctgtgcgggaaagagaccatggtgaccagcaccacagagcccagtcgctgcgagtacctcatggagctgatgacgccagccgcctgcccggagccaccgcctgaagcacccaccgaagacgaccatgacgagctctagctggatgggcgcagagaacctcaagaaggcatgaagccagcccctgcagtgccgtccacccgcccctctgggcctgcctgtggctctgttgccctcctctgtggcggcaggacctttgtggggcttcgtgccctgctctggggcccaggcggggctggtccacattcccaggccccaacagcctccaaagatgggtaaaggagcttgccctccctgggccccccaccttggtgactcgccccaccacccccagccctgtccctgccacccctcctagtggggactagtgaatgacttgacctgtgacctcaatacaataaatgtgatcccccaccc

SEQ ID NO: 265 - DNA, 379 bp, Homo sapiens
  5' terminal sequence. diphtheria toxin receptor (heparin-binding epidermal growth factor-like growth factor) (DTR) gene.
  modified_base (81): a, t, c or g
  modified_base (329): a, t, c or g
  modified_base (336): a, t, c or g
  modified_base (360): a, t, c or g
  modified_base (369): a, t, c or g
ggttctgtgacccatctgtagtaatttattgtctgtctacatttctgcagatcttccgtggtcagagtgccactgcgggantctgtatggtcaggatgtaggggttaacttggtcagagccactctatgagttggacttcagtcttgcctaggcgattttgtctaccatttgtgttttgaaagcccaaggtgctgatgtcaaagtgtaacagatatcagtgtctccccgtgtcctctccctgccaagtctcagaagaggttgggcttccatgcctgtagctttcctggtccctcacccccatggccccaggcccacagcgtggagactncactttncccttgtgtcaagacatttctctnaactcctgncattcttctg

SEQ ID NO: 266 - DNA, 2360 bp, Homo sapiens
  diphtheria toxin receptor (heparin-binding epidermal growth factor-like growth factor) (DTR) gene.
gctacgcgggccacgctgctggctggcctgacctaggcgcgcggggtcgggcggccgcgcgggcgggctgagtgagcaagacaagacactcaagaagagcgagctgcgcctgggtcccggccaggcttgcacgcagaggcgggcggcagacggtgcccggcggaatctcctgagctccgccgcccagctctggtgccagcgcccagtggccgccgcttcgaaagtgactggtgcctcgccgcctcctctcggtgcgggaccatgaagctgctgccgtcggtggtgctgaagctctttctggctgcagttctctcggcactggtgactggcgagagcctggagcggcttcggagagggctagctgctggaaccagcaacccggaccctcccactgtatccacggaccagctgctacccctaggaggcggccgggaccggaaagtccgtgacttgcaagaggcagatctggaccttttgagagtcactttatcctccaagccacaagcactggccacaccaaacaaggaggagcacgggaaaagaaagaagaaaggcaaggggctagggaagaagagggacccatgtcttcggaaatacaaggacttctgcatccatggagaatgcaaatatgtgaaggagctccgggctccctcctgcatctgccacccgggttaccatggagagaggtgtcatgggctgagcctcccagtggaaaatcgcttatatacctatgaccacacaaccatcctggccgtggtggctgtggtgctgtcatctgtctgtctgctggtcatcgtggggcttctcatgtttaggtaccataggagaggaggttatgatgtggaaaatgaagagaaagtgaagttgggcatgactaattcccactgagagagacttgtgctcaaggaatcggctggggactgctacctctgagaagacacaaggtgatttcagactgcagaggggaaagacttccatctagtcacaaagactccttcgtccccagttgccgtctaggattgggcctcccataattgctttgccaaaataccagagccttcaagtgccaaacagagtatgtccgatggtatctgggtaagaagaaagcaaaagcaagggaccttcatgcccttctgattcccctccaccaaaccccacttcccctcataagtttgtttaaacacttatcttctggattagaatgccggttaaattccatatgctccaggatctttgactgaaaaaaaaaaagaagaagaagaaggagagcaagaaggaaagatttgtgaactggaagaaagcaacaaagattgagaagccatgtactcaagtaccaccaagggatctgccattgggaccctccagtgctggatttgatgagttaactgtgaaataccacaagcctgagaactgaattttgggacttctacccagatggaaaaataacaactatttttgttgttgttgtttgtaaatgcctcttaaattatatatttattttattctatgtatgttaatttatttagtttttaacaatctaacaataatatttcaagtgcctagactgttactttggcaatttcctggccctccactcctcatccccacaatctggcttagtgccacccacctttgccacaaagctaggatggttctgtgacccatctgtagtaatttattgtctgtctacatttctgcagatcttccgtggtcagagtgccactgcgggagctctgtatggtcaggatgtaggggttaacttggtcagagccactctatgagttggacttcagtcttgcctaggcgattttgtctaccatttgtgttttgaaagcccaaggtgctgatgtcaaagtgtaacagatatcagtgtctccccgtgtcctctccctgccaagtctcagaagaggttgggcttccatgcctgtagctttcctggtccctcacccccatggccccaggccacagcgtgggaactcactttcccttgtgtcaagacatttctctaactcctgccattcttctggtgctactccatgcaggggtcagtgcagcagaggacagtctggagaaggtattagcaaagcaaaaggctgagaaggaacagggaacattggagctgactgttcttggtaactgattacctgccaattgctaccgagaaggttggaggtggggaaggctttgtataatcccacccacctcaccaaaacgatgaaggtatgctgtcatggtcctttctggaagtttctggtgccatttctgaactgttacaacttgtatttccaaacctggttcatatttatactttgcaatccaaataaagataacccttattccataaaaaaaaaaaaaaaaaa

SEQ ID NO: 267 - DNA, 435 bp, Homo sapiens
  5' terminal sequence. integrin, beta 2 (antigen cd18 (p95), lymphocyte function-associated antigen 1; macrophage antigen 1 (mac-1) beta subunit) (ITGB2) gene.
  modified_base (79): a, t, c or g
  modified_base (383): a, t, c or g
  modified_base (405): a, t, c or g
aggagtgccccggctgcccctcaccctgtggcaagtacatctcctgcgccgagtgcctgaagttcgaaaagggcccctntggaagaactgcagcgcggcgtgtccgggcctgcagctgtcgaacaaccccgtgaagggcaggacctgcaaggagagggactcagagggctgctgggtggcctacacgctggagcagcaggacgggatggaccgctacctcatctatgtggatgagagccgagagtgtgtggcaggccccaacatcgccgccatcgtcgggggcaccgtgggcaggcatcgtgctgatcggcattctcctgctggtcatctgggaaggctctgatccacctgagcgacctccgggagttacaggcgttttgagnaggagaagctcaagtcccagtnggaacaatgattattccctttttcaagagc

SEQ ID NO: 268 - DNA, 2776 bp, Homo sapiens
  integrin, beta 2 (antigen cd18 (p95), lymphocyte function-associated antigen 1; macrophage antigen 1 (mac-1) beta subunit) (ITGB2) gene.
cagggcagactggtagcaaagcccccacgcccagccaggagcaccgccgcggactccagcacaccgagggacatgctgggcctgcgccccccactgctcgccctggtggggctgctctccctcgggtgcgtcctctctcaggagtgcacgaagttcaaggtcagcagctgccgggaatgcatcgagtcggggcccggctgcacctggtgccagaagctgaacttcacagggccgggggatcctgactccattcgctgcgacacccggccacagctgctcatgaggggctgtgcggctgacgacatcatggaccccacaagcctcgctgaaacccaggaagaccacaatgggggccagaagcagctgtccccacaaaaagtgacgctttacctgcgaccaggccaggcagcagcgttcaacgtgaccttccggcgggccaagggctaccccatcgacctgtactatctgatggacctctcctactccatgcttgatgacctcaggaatgtcaagaagctaggtggcgacctgctccgggccctcaacgagatcaccgagtccggccgcattggcttcgggtccttcgtggacaagaccgtgctgccgttcgtgaacacgcaccctgataagctgcgaaacccatgccccaacaaggagaaagagtgccagcccccgtttgccttcaggcacgtgctgaagctgaccaacaactccaaccagtttcagaccgaggtcgggaagcagctgatttccggaaacctggatgcacccgagggtgggctggacgccatgatgcaggtcgccgcctgcccggaggaaatcggctggcgcaacgtcacgcggctgctggtgtttgccactgatgacggcttccatttcgcgggcgacggaaagctgggcgccatcctgacccccaacgacggccgctgtcacctggaggacaacttgtacaagaggagcaacgaattcgactacccatcggtgggccagctggcgcacaagctggctgaaaacaacatccagcccatcttcgcggtgaccagtaggatggtgaagacctacgagaaactcaccgagatcatccccaagtcagccgtgggggagctgtctgaggactccagcaatgtggtccatctcattaagaatgcttacaataaactctcctccagggtcttcctggatcacaacgccctccccgacaccctgaaagtcacctacgactccttctgcagcaatggagtgacgcacaggaaccagcccagaggtgactgtgatggcgtgcagatcaatgtcccgatcaccttccaggtgaaggtcacggccacagagtgcatccaggagcagtcgtttgtcatccgggcgctgggcttcacggacatagtgaccgtgcaggttcttccccagtgtgagtgccggtgccgggaccagagcagagaccgcagcctctgccatggcaagggcttcttggagtgcggcatctgcaggtgtgacactggctacattgggaaaaactgtgagtgccagacacagggccggagcagccaggagctggaaggaagctgccggaaggacaacaactccatcatctgctcagggctgggggactgtgtctgcgggcagtgcctgtgccacaccagcgacgtccccggcaagctgatatacgggcagtactgcgagtgtgacaccatcaactgtgagcgctacaacggccaggtctgcggcggcccggggagggggctctgcttctgcgggaagtgccgctgccacccgggctttgagggctcagcgtgccagtgcgagaggaccactgagggctgcctgaacccgcggcgtgttgagtgtagtggtcgtggccggtgccgctgcaacgtatgcgagtgccattcaggctaccagctgcctctgtgccaggagtgccccggctgcccctcaccctgtggcaagtacatctcctgcgccgagtgcctgaagttcgaaaagggcccctttgggaagaactgcagcgcggcgtgtccgggcctgcagctgtcgaacaaccccgtgaagggcaggacctgcaaggagagggactcagagggctgctgggtggcctacacgctggagcagcaggacgggatggaccgctacctcatctatgtggatgagagccgagagtgtgtggcaggccccaacatcgccgccatcgtcgggggcaccgtggcaggcatcgtgctgatcggcattctcctgctggtcatctggaaggctctgatccacctgagcgacctccgggagtacaggcgctttgagaaggagaagctcaagtcccagtggaacaatgataatccccttttcaagagcgccaccacgacggtcatgaaccccaagtttgctgagagttaggagcacttggtgaagacaaggccgtcaggacccaccatgtctgccccatcacgcggccgagacatggcttggccacagctcttgaggatgtcaccaattaaccagaaatccagttattttccgccctcaaaatgacagccatggccggccggtgcttctgggggctcgtcggggggacagctccactctgactggcacagtctttgcatggagacttgaggagggcttgaggttggtgaggttaggtgcgtgtttcctgtgcaagtcaggacatcagtctgattaaaggtggtgccaatttatttacatttaaacttgtcagggtataaaatgacatcccattaattatattgttaatcaatcacgtgtatagaaaaaaaaataaaacttcaat

SEQ ID NO: 269 - DNA, 449 bp, Homo sapiens
  5' terminal sequence. neogenin (chicken) homolog 1 (NEO1) gene.
  modified_base (329): a, t, c or g
  modified_base (351): a, t, c or g
  modified_base (361): a, t, c or g
  modified_base (378): a, t, c or g
  modified_base (398): a, t, c or g
  modified_base (418): a, t, c or g
ccaggaccctgaaggtgctaccagctcctcttacttggccagctcccaagaggaagattcaggccagagtcttcccactgcccatgttcgcccttcccacccattgaagagcttcgccgtgccagcaatcccgcctccaggacctcccacctatgatcctgcattgccaagcacaccattactgtcccagcaagctctgaaccatcacattcactcagtgaagacagcctccatcgggactctagggaagggagccggcctcctatgccagtggttgttcccagtgcccctgaagtgcagggagaccacaagggtgtttggaaggattncgagagtaggtattgaaccagntgaggttgancaaagagttgggccatngggggagggattaattgaangggaccttaaacgttttttnacaacagcttgacggacttttaacggggggc

SEQ ID NO: 270 - DNA, 5297 bp, Homo sapiens
  neogenin (chicken) homolog 1 (NEO1) gene.
gggccgggccgggctgggctggagcagcggcgcccgggagccgagcttgcagcgagggaccggctgaggcgcgcgggagggaaggaggcaagggctccgcggcgctgtcgcgctgccgctcactctcggggaagagatggcggcggagcggggagcccggcgactcctcagcaccccctccttctggctctactgcctgctgctgctcgggcgccgggcgccgggcgccgcggcggccaggagcggctccgcgccgcagtccccaggagccagcattcgaacgttcactccattttattttctggtggagccggtggatacactctcagttagaggctcttctgttatattaaactgttcagcatattctgagccttctccaaaaattgaatggaaaaaagatggaacttttttaaacttagtatcagatgatcgacgccagcttctcccggatggatctttatttatcagcaatgtggtgcattccaaacacaataaacctgatgaaggttattatcagtgtgtggccactgttgagagtcttggaactattatcagtagaacagcgaagctcatagtagcaggtcttccaagatttaccagccaaccagaaccttcctcagtttatgctgggaacggagcaattctgaattgtgaagttaatgcagatttggtcccatttgtgaggtgggaacagaacagacaaccccttcttctggatgatagagttatcaaacttccaagtggaatgctggttatcagcaatgcaactgaaggagatggcgggctttatcgctgcgtagtggaaagtggtgggccaccaaagtatagtgatgaagttgaattgaaggttcttccagatcctgaggtgatatcagacttggtatttttgaaacagccttctcccttagtcagagtcattggtcaggatgtagtgttgccatgtgttgcttcaggacttcctactccaaccattaaatggatgaaaaatgaggaggcacttgacacagaaagctctgaaagattggtattgctggcaggtggtagcctggagatcagtgatgttactgaggatgatgctgggacttatttttgtatagctgataatggaaatgagacaattgaagctcaagcagagcttacagtgcaagctcaacctgaattcctgaagcagcctactaatatatatgctcacgaatctatggatattgtatttgaatgtgaagtgactggaaaaccaactccaactgtgaagtgggtcaaaaatggggatatggttatcccaagtgattattttaagattgtaaaggaacataatcttcaagttttgggtctggtgaaatcagatgaagggttctatcagtgcattgctgaaaatgatgttggaaatgcacaagctggagcccaactgataatccttgaacatgcaccagccacaacgggaccactgccttcagctcctcgggatgtcgtggcctccctggtctctacccgcttcatcaaattgacgtggcggacacctgcatcagatcctcacggagacaaccttacctactctgtgttctacaccaaggaagggattgctagggaacgtgttgagaataccagtcacccaggagagatgcaagtaaccattcaaaacctaatgccagcgaccgtgtacatctttagagttatggctcaaaataagcatggctcaggagagagttcagctccactgcgagtagaaacacaacctgaggttcagctccctggcccagcacctaaccttcgtgcatatgcagcttcgcctacctccatcactgttacgtgggaaacaccagtgtctggcaatggggaaattcagaattataagttgtactacatggaaaaggggactgataaagaacaggatgttgatgtttcaagtcactcttacaccattaatgggttgaaaaaatatacagagtatagtttccgagtggtggcctacaataaacatggtcctggagtttccacaccagatgttgctgttcgaacattgtcagatgttcccagtgctgctcctcagaatctgtccttggaagtgagaaattcaaagagtattatgattcactggcagccacctgctccagccacacaaaatgggcagattactggctacaagattcgctaccgaaaggcctcccgaaagagtgatgtcactgagaccttggtaagcgggacacagctgtctcagctgattgaaggtcttgatcgggggactgagtataatttccgagtggctgctctaacaatcaatggtacaggcccggcaactgactggctgtctgctgaaacttttgaaagtgacctagatgaaactcgtgttcctgaagtgcctagctctcttcacgtacgcccgctcgttactagcatcgtagtgagctggactcctccagagaatcagaacattgtggtcagaggttacgccattggttatggcattggcagccctcatgcccagaccatcaaagtggactataaacagcgctattacaccattgaaaatctggatcccagctctcactatgtgattaccctgaaagcatttaataacgtgggtgaaggcatccccctgtatgagagtgctgtgaccaggcctcacacagacacttctgaagttgatttatttgttattaatgctccatacactccagtgccagatcccactcccatgatgccaccagtgggagttcaggcttccattctgagtcatgacaccatcaggattacgtgggcagacaactcgctgcccaagcaccagaagattacagactcccgatactacaccgtccgatggaaaaccaacatcccagcaaacaccaagtacaagaatgcaaatgcaaccactttgagttatttggtgactggtttaaagccgaatacactctatgaattctctgtgatggtgaccaaaggtcgaagatcaagtacatggagtatgacagcccatgggaccacctttgaattagttccgacttctccacccaaggatgtgactgttgtgagtaaagaggggaaacctaagaccataattgtgaattggcagcctccctctgaagccaatggcaaaattacaggttacatcatatattacagtacagatgtgaatgcagagatacatgactgggttattgagcctgttgtgggaaacagactgactcaccagatacaagagttaactcttgacacaccatactacttcaaaatccaggcacggaactcaaagggcatgggacccatgtctgaagctgtccaattcagaacacctaaagcggactcctctgataaaatgcctaatgatcaagcctcagggtctggagggaaaggaagccggctgccagacctaggatccgactacaaacctccaatgagcggcagtaacagccctcatgggagccccacctctcctctggacagtaatatgctgctggtcataattgtttctgttggcgtcatcaccatcgtggtggttgtgattatcgctgtcttttgtacccgtcgtaccacctctcaccagaaaaagaaacgagctgcctgcaaatcagtgaatggctctcataagtacaaagggaattccaaagatgtgaaacctccagatctctggatccatcatgagagactggagctgaaacccattgataagtctccagacccaaaccccatcatgactgatactccaattcctcgcaactctcaagatatcacaccagttgacaactccatggacagcaatatccatcaaaggcgaaattcatacagagggcatgagtcagaggacagcatgtctacactggctggaaggcgaggaatgagaccaaaaatgatgatgccctttgactcccagccaccccagcctgtgattagtgcccatcccatccattccctcgataaccctcaccatcatttccactccagcagcctcgcttctccagctcgcagtcatctctaccacccgggcagcccatggcccattggcacatccatgtccctttcagacagggccaattccacagaatccgttcgaaatacccccagcactgacaccatgccagcctcttcgtctcaaacatgctgcactgatcaccaggaccctgaaggtgctaccagctcctcttacttggccagctcccaagaggaagattcaggccagagtcttcccactgcccatgttcgcccttcccacccattgaagagcttcgccgtgccagcaatcccgcctccaggacctcccacctatgatcctgcattgccaagcacaccattactgtcccagcaagctctgaaccatcacattcactcagtgaagacagcctccatcgggactctaggaaggagccggcctcctatgccagtggttgttcccagtgcccctgaagtgcaggagaccacaaggatgttggaagactccgagagtagctatgaaccagatgagctgaccaaagagatggcccacctggaaggactaatgaaggacctaaacgctatcacaacagcatgacgaccttcaccaggacctgacttcaaacctgagtctggaagtcttggaacttaacccttgaaaacaaggaattgtacagagtacgagaggacagcacttgagaacacagaatgagccagcagactggccagcgcctctgtgtagggctggctccaggcatggccacctgccttcccctggtcagcctggaagaagcctgtgtcgaggcagcttccctttgcctgctgatattctgcaggactgggcaccatgggccaaaattttgtgtccagggaagaggcgagaagtgcaacctgcatttcactttgtggtcaggccgtgtctttgtgctgtgactgcatcacctttatggagtgtagacattggcatttatgtacaattttatttgtgtcttattttattttaccttcaaaaacaaaaacgccatccaaaaccaaggaagtccttggtgttctccacaagtggttgacatttgactgcttgttccaattatgtatggaaagtctttgacagtgtgggtcgttcctggggttggcttgttttttggtttcatttttattttttaattctgagtcattgcatcctctaccagctgttaatccatcactctgagggggaggaaatgttgcattgctgtttgtaagctttttttattatttttttattataattattaaaggcctgactctttcctctcatcactgtgagattacagatctatttgaattgaatgaaatgtaacattgaaaaaaaaaaaaaaaaaaaaaaaaaaaaa

SEQ ID NO: 271 - DNA, 389 bp, Homo sapiens
  3' terminal sequence. pou domain, class 2, transcription factor 2 (POU2F2) gene.
  modified_base (10): a, t, c or g
  modified_base (11): a, t, c or g
  modified_base (17): a, t, c or g
  modified_base (228): a, t, c or g
cagggaattnnttcatnatggaaaaagacaactgaatgccctcaactgaatgtcttcatcccctcttgcctgaaatttccaccttcccataggctggggagggagtcagttccagagcagaggagggtgacagggttgaggagggacttgtgagagctagaacttggcaaaatggcctagcccacccttcaaaggggaaaagagggaggaacaggggatgaaaagttntccgcagccttcccttgaactctcccctgctgggggagggaggaggttaaagcaagaccccctgcccaggtggggagagctgggggccaggggagaaggggacaaatggtagggacacattctgtttgagcacaatgctaaaaattctgtacatcctttgg

SEQ ID NO: 272 - DNA, 2048 bp, Homo sapiens
  pou domain, class 2, transcription factor 2 (POU2F2) gene.
cgtcaacatgagttgggcctggggcagatgaggctggctggcggggcgggcagcatggttcactccagcatgggggctccagaaataagaatgtctaagcccctggaggccgagaagcaaggtctggactccccatcagagcacacagacaccgaaagaaatggaccagacactaatcatcagaacccccaaaataagacctccccattctccgtgtccccaactggccccagtacaaagatcaaggctgaagaccccagtggcgattcagccccagcagcacccctgccccctcagccggcccagcctcatctgccccaggcccaactcatgttgacgggcagccagctagctggggacatacagcagctcctccagctccagcagctggtgcttgtgccaggccaccacctccagccacctgctcagttcctgctaccgcaggcccagcagagccagccaggcctgctaccgacaccaaatctattccagctacctcagcaaacccagggagctcttctgacctcccagccccgggccgggcttcccacacagccccccaaatgcttggagccaccatcccaccccgaggagcccagtgatctggaggagctggagcaattcgcccgcaccttcaagcaacgccgcatcaagctgggcttcacgcagggtgatgtgggcctggccatgggcaagctctacggcaacgacttcagccagacgaccatttcccgcttcgaggccctcaacctgagcttcaagaacatgtgcaaactcaagcccctcctggagaagtggctcaacgatgcagagactatgtctgtggactcaagcctgcccagccccaaccagctgagcagccccagcctgggtttcgacggcctgcccggccggagacgcaagaagaggaccagcatcgagacaaacgtccgcttcgccttagagaagagttttctagcgaaccagaagcctacctcagaggagatcctgctgatcgccgagcagctgcacatggagaaggaagtgatccgcgtctggttctgcaaccggcgccagaaggagaaacgcatcaacccctgcagtgcggcccccatgctgcccagcccagggaagccggccagctacagcccccatatggtcacaccccaagggggcgcggggaccttaccgttgtcccaagcttccagcagtctgagcacaacagttactaccttatcctcagctgtggggacgctccaccccagccggacagctggagggggtgggggcgggggcggggctgcgccccccctcaattccatcccctctgtcactcccccacccccggccaccaccaacagcacaaaccccagccctcaaggcagccactcggctatcggcttgtcaggcctgaaccccagcacgggccctggcctctggtggaaccctgccccttaccagccttgatggcagcgggaatctggtgctgggggcagccggtgcagccccggggagccctggcctggtgacctcgccgctcttcttgaatcatgctgggctgcccctgctcagcaccccgcctggtgtgggcctggtctcagcagcggctgcggctgtggcagcctccatctccagcaagtctcctggcctctcctcctcatcctcttcatcctcatcctcctcctcctccacttgcagcgagacggcagcacagacccctggaggtccaggggggcccgaggcagggtccaaacctgagtgagggccagccatgcctcccctcccattcctctggtccctgccttggtcccttgcctgggaagaggggcaggaggccagtggtggggacgcagagggtcctcagagcaggagtgacaagggaggaaagaccaaaaaaacaaccaaccaaaaaaaaaaaaaaaaaaggaaagaaactaaccaacaaaagagaaaaccaaaaataatcacaacagaaaccagctgccccaaaggaaccagaggtgaaaaacaaacaaaaaaaaccaaaaacaaaccaaaaaaaaaaaaaaacctctaccccctctagagcc

SEQ ID NO: 273 - DNA, 472 bp, Homo sapiens
  3' terminal sequence. baculoviral iap repeat-containing 4 (BIRC4) gene.
ttttctatctttccaccagcatggaacaattgattcctttttcacacaaaacaaattatgtgattggggagattaactctaatctccacatttatatacagaaagctccatttgttaagcctatctgaaaagaataaaaaatccagatgattaattcacttacacttagaaattaaatcagtatactatgaatacacattgtgttcagttatagtatgatgcttcttattcttagtctatggtttcaattaaataacagtaaaaaaaatggataatacagctaataccctgaaaaatcaagaaattcaaagattatattgccaactaaaacactgccatgtacattttttttcctacttggtagcaaatgctaatggaattcaatcctgattacttaaagtcagttcacatcacacattcaatcagggtaataagaacaacataacatgcctaccatagagttagattaaga

SEQ ID NO: 274 - DNA, 2540 bp, Homo sapiens
  baculoviral iap repeat-containing 4 (BIRC4) gene.
gaaaaggtggacaagtcctattttcaagagaagatgacttttaacagttttgaaggatctaaaacttgtgtacctgcagacatcaataaggaagaagaatttgtagaagagtttaatagattaaaaacttttgctaattttccaagtggtagtcctgtttcagcatcaacactggcacgagcagggtttctttatactggtgaaggagataccgtgcggtgctttagttgtcatgcagctgtagatagatggcaatatggagactcagcagttggaagacacaggaaagtatccccaaattgcagatttatcaacggcttttatcttgaaaatagtgccacgcagtctacaaattctggtatccagaatggtcagtacaaagttgaaaactatctgggaagcagagatcattttgccttagacaggccatctgagacacatgcagactatcttttgagaactgggcaggttgtagatatatcagacaccatatacccgaggaaccctgccatgtattgtgaagaagctagattaaagtcctttcagaactggccagactatgctcacctaaccccaagagagttagcaagtgctggactctactacacaggtattggtgaccaagtgcagtgcttttgttgtggtggaaaactgaaaaattgggaaccttgtgatcgtgcctggtcagaacacaggcgacactttcctaattgcttctttgttttgggccggaatcttaatattcgaagtgaatctgatgctgtgagttctgataggaatttcccaaattcaacaaatcttccaagaaatccatccatggcagattatgaagcacggatctttacttttgggacatggatatactcagttaacaaggagcagcttgcaagagctggattttatgctttaggtgaaggtgataaagtaaagtgctttcactgtggaggagggctaactgattggaagcccagtgaagacccttgggaacaacatgctaaatggtatccagggtgcaaatatctgttagaacagaagggacaagaatatataaacaatattcatttaactcattcacttgaggagtgtctggtaagaactactgagaaaacaccatcactaactagaagaattgatgataccatcttccaaaatcctatggtacaagaagctatacgaatggggttcagtttcaaggacattaagaaaataatggaggaaaaaattcagatatctgggagcaactataaatcacttgaggttctggttgcagatctagtgaatgctcagaaagacagtatgcaagatgagtcaagtcagacttcattacagaaagagattagtactgaagagcagctaaggcgcctgcaagaggagaagctttgcaaaatctgtatggatagaaatattgctatcgtttttgttccttgtggacatctagtcacttgtaaacaatgtgctgaagcagttgacaagtgtcccatgtgctacacagtcattactttcaagcaaaaaatttttatgtcttaatctaactctatagtaggcatgttatgttgttcttattaccctgattgaatgtgtgatgtgaactgactttaagtaatcaggattgaattccattagcatttgctaccaagtaggaaaaaaaatgtacatggcagtgttttagttggcaatataatctttgaatttcttgatttttcagggtattagctgtattatccattttttttactgttatttaattgaaaccatagactaagaataagaagcatcatactataactgaacacaatgtgtattcatagtatactgatttaatttctaagtgtaagtgaattaatcatctggattttttattcttttcagataggcttaacaaatggagctttctgtatataaatgtggagattagagttaatctccccaatcacataatttgttttgtgtgaaaaaggaataaattgttccatgctggtggaaagatagagattgtttttagaggttggttgttgtgttttaggattctgtccattttcttgtaaagggataaacacggacgtgtgcgaaatatgtttgtaaagtgatttgccattgttgaaagcgtatttaatgatagaatactatcgagccaacatgtactgacatggaaagatgtcagagatatgttaagtgtaaaatgcaagtggcgggacactatgtatagtctgagccagatcaaagtatgtatgttgttaatatgcatagaacgagagatttggaaagatatacaccaaactgttaaatgtggtttctcttcggggagggggggattgggggaggggccccagaggggttttagaggggccttttcactttcgacttttttcattttgttctgttcggattttttataagtatgtagaccccgaagggttttatgggaactaacatcagtaacctaacccccgtgactatcctgtgctcttcctagggagctgtgttgtttcccacccaccacccttccctctgaacaaatgcctgagtgctggggcactttg

SEQ ID NO: 275 - DNA, 842 bp, Homo sapiens
  3' terminal sequence. death associated protein 3 (DAP3) gene.
  modified_base (374): a, t, c or g
  modified_base (588): a, t, c or g
  modified_base (677): a, t, c or g
tagaaagatattttattttttaggaaaagagccataattatcttaaatgtgaaaaaccacatccaataaactgatataaagttttaggaacaagggaatatcttattgtcacgcattcacagtgaaacccattttaatgcaggtccagagccaactgcagtcctgtccaatcccataggtacaagggcctggctcctcttcctgtgtactgcccgacttcctcatcttactgggtccagcataaagcagatgtccactgtcttcctcacatgctgtgatcttggcttagaggtaggcacagtgccgctccagcagcgaggggttcgcgttacttaggaacagcagctcttttttcccttcttctgtaggagctntctcatgttgaagccaattgttttccaaataatactgaatacaactttcaaattcctttgggttatagttggaaaccaggatgggaataaagggatccagggcatcaaatccttcctttcccagcaactcctgcggcagataggctttccggggcttaaagagagacccagtctggctcagagccgacacaatggcgcctccatgccaatcatncttcatcattttcctcagttgtgaacaagtgctaattccctcggggcaatcgggctttatcttctgttttcagagggttcttccccaangagcattgatgccaccacggccacctatgggtgaaacataccccaatgaactttgctctttagctctttcagcacaatttcaaactgatctggtgcgtccctcaaccgtgttatgccctgtcaaaccacttctcccagaagactccctttcttaggcttttctct

SEQ ID NO: 276 - DNA, 1608 bp, Homo sapiens
  death associated protein 3 (DAP3) gene.
gaattccgccggccccaggcagcgtgtgtcggtcgcctaggctggagaactagtcctcgactcacgtgcaaggatgatgctgaaaggaataacaaggcttatctctaggatccataagttggaccctgggcgttttttacacatggggacccaggctcgccaaagcattgctgctcacctagataaccaggttccagttgagagtccgagagctatttcccgcaccaatgagaatgacccggccaagcatggggatcagcacgagggtcagcactacaacatctccccccaggatttggagactgtatttccccatggccttcctcctcgctttgtgatgcaggtgaagacattcagtgaagcttgcctgatggtaaggaaaccagccctagaacttctgcattacctgaaaaacaccagttttgcttatccagctatacgatatcttctgtatggagagaagggaacaggaaaaaccctaagtctttgccatgttattcatttctgtgcaaaacaggactggctgatactacatattccagatgctcatctttgggtgaaaaattgtcgggatcttctgcagtccagctacaacaaacagcgctttgatcaacctttagaggcttcaacctggctgaagaatttcaaaactacaaatgagcgcttcctgaaccagataaaagttcaagagaagtatgtctggaataagagagaaagcactgagaaagggagtcctctgggagaagtggttgaacagggcataacacgggtgaggaacgccacagatgcagttggaattgtgctgaaagagctaaagaggcaaagttctttgggtatgtttcacctcctagtggccgtggatggaatcaatgctctttggggaagaaccactctgaaaagagaagataaaagcccgattgcccccgaggaattagcacttgttcacaacttgaggaaaatgatgaaaaatgattggcatggaggcgccattgtgtcggctttgagccagactgggtctctctttaagccccggaaagcctatctgccccaggagttgctgggaaaggaaggatttgatgccctggatccctttattcccatcctggtttccaactataacccaaaggaatttgaaagttgtattcagtattatttggaaaacaattggcttcaacatgagaaagctcctacagaagaagggaaaaaagagctgctgttcctaagtaacgcgaacccctcgctgctggagcggcactgtgcctacctctaagccaagatcacagcatgtgaggaagacagtggacatctgctttatgctggacccagtaagatgaggaagtcgggcagtacacaggaagaggagccaggcccttgtacctatgggattggacaggactgcagttggctctggacctgcattaaaatgggtttcactgtgaatgcgtgacaataagatattcccttgttcctaaaactttatatcagtttattggatgtggtttttcacatttaagataattatggctcttttcctaaaaaataaaatatctttctaaaaaaaaaaaaaaaaaaaaaaaaaaaaaaaaaaaaaaaaaaaaaaaaaaaaaa

SEQ ID NO: 277 - DNA, 361 bp, Homo sapiens
  5' terminal sequence. gonadotropin-releasing hormone 1 (leutinizing-releasing hormone) (GNRH1) gene.
  modified_base (49): a, t, c or g
  modified_base (328): a, t, c or g
  modified_base (355): a, t, c or g
ttagattgcatgctattgtatgtctacagggcatttgacagcccaaggntaaatccaggtgggacggtatctaatgatgtcctgtccttcactgtccttgccatcaccagccacagagatccaggctttggggactcccacagcttatcgaccagtgtttgatttagtttttagcctctttcccatcaaatgaaaattaacttggagacacatttcattagaaaattagaggcccccttggctaggaaggcatctggtctggggactaactactttgaacagtgttgagtcctctctcccacagatggttcagccagcagtaatgctnagggaagactgaagggatcaaataganaaatgt

SEQ ID NO: 278 - DNA, 470 bp, Homo sapiens
  gonadotropin-releasing hormone 1 (leutinizing-releasing hormone) (GNRH1) gene.
gggatctttttggctctctgcctctaaacagaatgaagccaattcaaaaactcctagctggccttattctactgacttggtgcgtggaaggctgctccagccagcactggtcctatggactgcgccctggaggaaagagagatgccgaaaatttgattgattctttccaagagatagtcaaagaggttggtcaactggcagaaacccaacgcttcgaatgcaccacgcaccagccacgttctcccctccgagacctgaaaggagctctggaaagtctgattgaagaggaaactgggcagaagaagatttaaatccattgggccagaaggaatgaccattactaacatgacttaagtataattctgacattgaaaatttataacccattaaatacctgtaaatggtatgaatttcagaaatccttacaccaagttgcacatattccataataaagtgctgtgttgtgaatg

SEQ ID NO: 279 - DNA, 320 bp, Homo sapiens
  3' terminal sequence. interleukin 2 receptor, gamma (severe combined immunodeficiency) (IL2RG) gene.
  modified_base (1): a, t, c or g
  modified_base (283): a, t, c or g
ntctaaatatcaacagaaactttatttctcatcggttcaggaacaatcggagggtagatggaaagaggaagggagggaaagagggagggaggaagaatcctgcgaaaaggaagggccagactgagggagaagaaaaacatgttcggggcaaaagggtaattctcaagtggggaatgccaaatgaaggggtgcttacatgggggcacaaaattccaaatcagccacagtggggtgaggtgagtatgagacgcaggtggggttgaatgaaggaaagttagtaccncttagggctacaggaccctggggttcttctttcagag

SEQ ID NO: 280 - DNA, 407 bp, Homo sapiens
  5' terminal sequence. interleukin 2 receptor, gamma (severe combined immunodeficiency) (IL2RG) gene.
  modified_base (142): a, t, c or g
  modified_base (214): a, t, c or g
  modified_base (299): a, t, c or g
  modified_base (304): a, t, c or g
  modified_base (367): a, t, c or g
  modified_base (392): a, t, c or g
attcggcacagggaacttttcggcctggagtggtgtgtctaagggactggctgagagtctgcagccagactacagtgaacgactctgcctcgtcagtgagattcccccaaaaggaggggcccttggggaggggcctgggctnccccatgcaaccagcatagcccctactgggcccccccatgttacaccctaaagcctgaaacctgaaccccantactctgacagaagaaccccagggtcctgtagccctaagtggtactaactttccttcattcaacccacctgcgtcttatactcanctcancccactgttggctgattttggatttttgtggccccatgtaaggaaccctttaatttggcattncccaattgagaattaacctttttgncccgaacatgttttt

SEQ ID NO: 281 - DNA, 1451 bp, Homo sapiens
  interleukin 2 receptor, gamma (severe combined immunodeficiency) (IL2RG) gene.
gaagagcaagcgccatgttgaagccatcattaccattcacatccctcttattcctgcagctgcccctgctgggagtggggctgaacacgacaattctgacgcccaatgggaatgaagacaccacagctgatttcttcctgaccactatgcccactgactccctcagtgtttccactctgcccctcccagaggttcagtgttttgtgttcaatgtcgagtacatgaattgcacttggaacagcagctctgagccccagcctaccaacctcactctgcattattggtacaagaactcggataatgataaagtccagaagtgcagccactatctattctctgaagaaatcacttctggctgtcagttgcaaaaaaaggagatccacctctaccaaacatttgttgttcagctccaggacccacgggaacccaggagacaggccacacagatgctaaaactgcagaatctggtgatcccctgggctccagagaacctaacacttcacaaactgagtgaatcccagctagaactgaactggaacaacagattcttgaaccactgtttggagcacttggtgcagtaccggactgactgggaccacagctggactgaacaatcagtggattatagacataagttctccttgcctagtgtggatgggcagaaacgctacacgtttcgtgttcggagccgctttaacccactctgtggaagtgctcagcattggagtgaatggagccacccaatccactgggggagcaatacttcaaaagagaatcctttcctgtttgcattggaagccgtggttatctctgttggctccatgggattgattatcagccttctctgtgtgtatttctggctggaacggacgatgccccgaattcccaccctgaagaacctagaggatcttgttactgaataccacgggaacttttcggcctggagtggtgtgtctaagggactggctgagagtctgcagccagactacagtgaacgactctgcctcgtcagtgagattcccccaaaaggaggggcccttggggaggggcctggggcctccccatgcaaccagcatagcccctactgggcccccccatgttacaccctaaagcctgaaacctgaaccccaatcctctgacagaagaaccccagggtcctgtagccctaagtggtactaactttccttcattcaacccacctgcgtctcatactcacctcaccccactgtggctgatttggaattttgtgcccccatgtaagcaccccttcatttggcattccccacttgagaattacccttttgccccgaacatgtttttcttctccctcagtctggcccttccttttcgcaggattcttcctccctccctctttccctcccttcctctttccatctaccctccgattgttcctgaaccgatgagaaataaagtttctgttgataatcatc

SEQ ID NO: 282 - DNA, 317 bp, Homo sapiens
  3' terminal sequence. death associated protein 3 (DAP3) gene.
  modified_base (105): a, t, c or g
  modified_base (299): a, t, c or g
  modified_base (305): a, t, c or g
atctaacacaacactttagaaagatattttattttttaggaaaagagccataattatcttaaatgtgaaaaaccacatccaataaactgatataaagttttaggnacaagggaatatcttattgtcacgcattcacagtgaaacccattttaatgcaggtccagagccaactgcagtcctgtccaatcccatagggtacaagggcctgggctcctcttcctgtgtactgcccgacttcctcatcttactggggtccagcataaagcaggatgtccactgtcttcctcacatgctgtgancttggncttaggaggtag

SEQ ID NO: 283 - DNA, 358 bp, Homo sapiens
  5' terminal sequence. death associated protein 3 (DAP3) gene.
  modified_base (170): a, t, c or g
  modified_base (277): a, t, c or g
  modified_base (296): a, t, c or g
  modified_base (303): a, t, c or g
  modified_base (345): a, t, c or g
  modified_base (353): a, t, c or g
aggacgggcgctttggagccggccccaggcagcgtgtgtcggtcgcctagtctggagaactagtcctcgactcacgtgcaaggatgatgctgaaaggaataacaaggcttatctctaggatccataagttggaccctgggcgttttttacacatggggacccaggctcgncaaagcattgctgctcacctagataacccaggttcccagttgagagtcccgagagctattttcccgcaaccaatgagaatgaccccggcccaagcatgggggatcancaaggagggtcaagcaatnacaacanttttccccccaggattttgggagaattgtaattttccccatnggcctttncttcc

SEQ ID NO: 284 - DNA, 416 bp, Homo sapiens
  5' terminal sequence. ptk2 protein tyrosine kinase 2 (PTK2) gene.
  modified_base (275): a, t, c or g
  modified_base (295): a, t, c or g
  modified_base (364): a, t, c or g
gcacagaagctattgaactctgacctgggtgagctcatcaacaagatgaaactggcccagcagtatgtcatgaccagcctccagcaagagtacaaaaagcaaatgctgactgctgctcacgccctggctgtggatgccaaaaacttactcgatgtcattgaccaagcaagactgaaaatgcttgggcagacgagaccacactgagcctcccctaggagcacgtcttgctaccctcttttgaagatgttctctagccttccaccagcagcgagganttaaccctgtgtcctcagtncgccagcacttacagctccaacttttttgaatgaccatctggttgaaaaatctttctcatataagtttnaaccacatttggatttggggttcattttttgttttgtttttttttcaatcat

SEQ ID NO: 285 - DNA, 3052 bp, Homo sapiens
  ptk2 protein tyrosine kinase 2 (PTK2) gene.
ccggtgtgaaggccatgagtgattactgggttgttggaaagaagtctaactatgaagtattagaaaaagatgttggtttaaagcgattttttcctaagagtttactggattctgtcaaggccaaaacactaagaaaactgatccaacaaacatttagacaatttgccaaccttaatagagaagaaagtattctgaaattctttgagatcctgtctccagtctacagatttgataaggaatgcttcaagtgtgctcttggttcaagctggattatttcagtggaactggcaatcggcccagaagaaggaatcagttacctaacggacaagggctgcaatcccacacatcttgctgacttcactcaagtgcaaaccattcagtattcaaacagtgaagacaaggacagaaaaggaatgctacaactaaaaatagcaggtgcacccgagcctctgacagtgacggcaccatccctaaccattgcggagaatatggctgacctaatagatgggtactgccggctggtgaatggaacctcgcagtcatttatcatcagacctcagaaagaaggtgaacgggctttgccatcaataccaaagttggccaacagcgaaaagcaaggcatgcggacacacgccgtctctgtgtcagaaacagatgattatgctgagattatagatgaagaagatacttacaccatgccctcaaccagggattatgagattcaaagagaaagaatagaacttggacgatgtattggagaaggccaatttggagatgtacatcaaggcatttatatgagtccagagaatccagctttggcggttgcaattaaaacatgtaaaaactgtacttcggacagcgtgagagagaaatttcttcaagaagcctgccattacacatctttgcactggaattggtgcagatatataagtgatcctaatgttgatgcctgcccagaccccaggaatgcagagttaacaatgcgtcagtttgaccatcctcatattgtgaagctgattggagtcatcacagagaatcctgtctggataatcatggagctgtgcacacttggagagctgaggtcatttttgcaagtaaggaaatacagtttggatctagcatctttgatcctgtatgcctatcagcttagtacagctcttgcatatctagagagcaaaagatttgtacacagggacattgctgctcggaatgttctggtgtcctcaaatgattgtgtaaaattaggagactttggattatcccgatatatggaagatagtacttactacaaagcttccaaaggaaaattgcctattaaatggatggctccagagtcaatcaattttcgacgttttacctcagctagtgacgtatggatgtttggtgtgtgtatgtgggagatactgatgcatggtgtgaagccttttcaaggagtgaagaacaatgatgtaatcggtcgaattgaaaatggggaaagattaccaatgcctccaaattgtcctcctaccctctacagccttatgacgaaatgctgggcctatgaccccagcaggcggcccaggtttactgaacttaaagctcagctcagcacaatcctggaggaagagaaggctcagcaagaagagcgcatgaggatggagtccagaagacaggccacagtgtcctgggactccggagggtctgatgaagcaccgcccaagcccagcagaccgggttatcccagtccgaggtccagcgaaggattttatcccagcccacagcacatggtacaaaccaatcattaccaggtttctggctaccctggttcacatggaatcacagccatggctggcagcatctatccaggtcaggcatctcttttggaccaaacagattcatggaatcatagatctcaggagatagcaatgtggcagcccaatgtggaggactctacagtattggacctgcgagggattgggcaagtgttgccaacccatctgatggaagagcgtctaatccgacagcaacaggaaatggaagaagatcagcgctggctggaaaaagaggaaagatttctgattggaaaccaacatatatatcagcctgtgggtaaaccagatcctgcagctccaccaaagaaaccgcctcgccctggagctcccggtcatctgggaagccttgccagcctcagcagccctgctgacagctacaacgagggtgtcaagcttcagccccaggaaatcagcccccctcctactgccaacctggaccggtcgaatgataaggtgtacgagaatgtgacgggcctggtgaaagctgtcatcgagatgtccagtaaaatccagccagccccaccagaggagtatgtccctatggtgaaggaagtcggcttggccctgaggacattattggccactgtggatgagaccattcccctcctaccagccagcacccaccgagagattgagatggcacagaagctattgaactctgacctgggtgagctcatcaacaagatgaaactggcccagcagtatgtcatgaccagcctccagcaagagtacaaaaagcaaatgctgactgccgctcacgccctggctgtggatgccaaaaacttactcgatgtcattgaccaagcaagactgaaaatgcttgggcagacgagaccacactgagcctcccctaggagcacgtcttgctaccctcttttgaagatgttctctagccttccaccagcagcgaggaattaaccctgtgtcctcagtcgccagcactcacagctccaacttttttgaatgaccatctggttgaaaaatctttctcatataagtttaaccacactttgatttgggttcattttttgttttgtttttttcaatcatgatattcagaaaaatccaggatccaaaatgtggcgtttttctaagaatgaaaattatatgtaagcttttaagcatcatgaagaacaatttatgttcacattaagatacgttctaaagggggatggccaaggggtgacatcttaattcctaaactaccttagctgcatagtggaagaggagagccggaattc

SEQ ID NO: 286 - DNA, 377 bp, Homo sapiens
  3' terminal sequence. cyclin-dependent kinase 4 (CDK4) gene.
  modified_base (2): a, t, c or g
  modified_base (29): a, t, c or g
  modified_base (237): a, t, c or g
  modified_base (270): a, t, c or g
  modified_base (300): a, t, c or g
  modified_base (360): a, t, c or g
gnataaaaaaggaccccaaatataaaggnagggaaagggacaagagggaacataccccttagtgtagagaaatgggaaggagaaggagaagcctcaaaaggaggtgggaggggaatgtcattaaggcagcaaagtaatctctgtagaaagatggaggaggaccctccatagcctcagagataaaggcaaagattgccctctcagtgtccagaagggaaatgggcagcttttcttccntccatgggcagccactccattgctcactccggnttaccttcatccttatgtaggataagagtnctgcagagcttcgaaagggcagagattcgcttgtgtggggttaaaagtcagcatttccancagcagcttttgcttcc

SEQ ID NO: 287 - DNA, 363 bp, Homo sapiens
  5' terminal sequence. cyclin-dependent kinase 4 (CDK4) gene.
  modified_base (149): a, t, c or g
  modified_base (173): a, t, c or g
  modified_base (256): a, t, c or g
  modified_base (331): a, t, c or g
  modified_base (347): a, t, c or g
catatctggacaaggcacccccaccaggcttgcagccgaaacgatcaaggatctgatgcgccagtttctaagaggcctagatttccttcatgccaattgcatcgttcaccgagatctgaagccagagaacattctggtgacaagtggtngaacagtcaagctggctgactttngcctggccagaatctacagctaccagatggcacttacacccgtggttgttacactctggtaccgagctcccgaagttcttctngcagtccacatatgcaacacctgtgggacatgtgggagtgttggctgtatctttgcagagatgtttcgtcgaaancctctctttctgtggnaaactctgtaaggccg

SEQ ID NO: 288 - DNA, 1443 bp, Homo sapiens
  cyclin-dependent kinase 4 (CDK4) gene.
  modified_base (1422): a, t, c or g
gccctcccagtttccgcgcgcctctttggcagctggtcacatggtgagggtgggggtgagggggcctctctagcttgcggcctgtgtctatggtcgggccctctgcgtccagctgctccggaccgagctcgggtgtatggggccgtaggaaccggctccggggccccgataacgggccgcccccacagcaccccgggctggcgtgagggtctcccttgatctgagaatggctacctctcgatatgagccagtggctgaaattggtgtcggtgcctatgggacagtgtacaaggcccgtgatccccacagtggccactttgtggccctcaagagtgtgagagtccccaatggaggaggaggtggaggaggccttcccatcagcacagttcgtgaggtggctttactgaggcgactggaggcttttgagcatcccaatgttgtccggctgatggacgtctgtgccacatcccgaactgaccgggagatcaaggtaaccctggtgtttgagcatgtagaccaggacctaaggacatatctggacaaggcacccccaccaggcttgccagccgaaacgatcaaggatctgatgcgccagtttctaagaggcctagatttccttcatgccaattgcatcgttcaccgagatctgaagccagagaacattctggtgacaagtggtggaacagtcaagctggctgactttggcctggccagaatctacagctaccagatggcacttacacccgtggttgttacactctggtaccgagctcccgaagttcttctgcagtccacatatgcaacacctgtggacatgtggagtgttggctgtatctttgcagagatgtttcgtcgaaagcctctcttctgtggaaactctgaagccgaccagttgggcaaaatctttgacctgattgggctgcctccagaggatgactggcctcgagatgtatccctgccccgtggagcctttccccccagagggccccgcccagtgcagtcggtggtacctgagatggaggagtcgggagcacagctgctgctggaaatgctgacttttaacccacacaagcgaatctctgcctttcgagctctgcagcactcttatctacataaggatgaaggtaatccggagtgagcaatggagtggctgccatggaaggaagaaaagctgccatttcccttctggacactgagagggcaatctttgcctttatctctgaggctatggagggtcctcctccatctttctacagagattactttgctgccttaatgacattcccctcccacctctccttttgaggcttctccttctccttcccatttctctacactaaggggtatgttccctcttgtccctttccctacctttatatttggggtccttttttatacaggaaaaacaaaaccaaaagaaanaatggcccttttttttttttt

SEQ ID NO: 289 - DNA, 394 bp, Homo sapiens
  3' terminal sequence. basic transcription factor 3 (BTF3) gene.
  modified_base (20): a, t, c or g
  modified_base (27): a, t, c or g
  modified_base (30): a, t, c or g
  modified_base (79): a, t, c or g
  modified_base (243): a, t, c or g
  modified_base (268): a, t, c or g
  modified_base (326): a, t, c or g
  modified_base (369): a, t, c or g
  modified_base (382): a, t, c or g
cccgcgtgtgtgcgcctaanctcaggnggnccacccgagaccccttgagcaccaaccctagtcccccgcgcggcccctnattcgctccgacaagatgaaagaaacaatcatgaaccagggaaaactcgccaaactgcaggcacaagtgcgcattggtgggaaaggaactgctcgcagaaagaagaaggtggttcatagaacagccacagcagatgacaaaaaacttcagttctccttaaagangttaggggtaaacaatatctctggnattgaagaggtgaatatgtttacaaaccagggaacagtgatccactttaacaaccctnaagttcagggcatctctgggcagcggacactttcaccattacnggccttgctgagncaaagcagctgg

SEQ ID NO: 290 - DNA, 477 bp, Homo sapiens
  basic transcription factor 3 (BTF3) gene.
atgcgacggacaggcgcacccgctcaggctgactctcgggggcgaggtcgagccaggggcggctgccctgggggcgaggcgacgctgtctcaacctccacctcgcggcggaacccgaggagaggagcctcagatgaaagaaacaatcatgaaccaggaaaaactcgccaaactgcaggcacaagtgcgcattggtgggaaagtgaatatgtttacaaaccaaggaacagtgatccactttaacaaccctaaagttcaggcatctctggcagcgaacactttcaccattacaggccatgctgagacaaagcagctgacagaaatgctacccagcatcttaaaccagcttggtgcggatagtctgactagtttaaggagactggccgaagctctgcccaaacaatctgtggatggaaaagcaccacttgctactggagaggatgatgatgatgaagttccaggaggcttccaagaatga

SEQ ID NO: 291 - DNA, 388 bp, Homo sapiens
  3' terminal sequence. colony stimulating factor 1 receptor, formerly mcdonough feline sarcoma viral (v-fms) oncogene homolog (CSF1R) gene.
  modified_base (91): a, t, c or g
  modified_base (223): a, t, c or g
  modified_base (292): a, t, c or g
  modified_base (314): a, t, c or g
tgctgttagtttaatgtggacagagacatcccacggcgtgactgttagttaggatgagtcagcttgggggagtttgtgcttcctgcttggngtggccagccacatgccaaggtcccctgccttctagcccagaatgacgggactgggcagaacacccccaacttttagctgccacttggctcattacagcagtaccagtatgggggtgggaggggtgaggctntggagtgaaggcggcgtatagggcagagactaagagggtcctgtgagattcttagaggagccatcctgntccaaggggcctgagctgagtntgggtctgtgagcatctgctgctcctctcagagaggggagatctcactctctgccagtctgtctagccccaaag

SEQ ID NO: 292 - DNA, 3992 bp, Homo sapiens
  colony stimulating factor 1 receptor, formerly mcdonough feline sarcoma viral (v-fms) oncogene homolog (CSF1R) gene.
ggcttcaggaagggcagacagagtgtccaaaagcgtgagagcacgaagtgaggagaaggtggagaagagagaagaggaagaggaagaggaagagaggaagcggagggaactgcggccaggctaaaaggggaagaagaggatcagcccaaggaggaggaagaggaaaacaagacaaacagccagtgcagaggagaggaacgtgtgtccagtgtcccgatccctgcggagctagtagctgagagctctgtgccctgggcaccttgcagccctgcacctgcctgccacttccccaccgaggccatgggcccaggagttctgctgctcctgctggtggccacagcttggcatggtcagggaatcccagtgatagagcccagtgtccccgagctggtcgtgaagccaggagcaacggtgaccttgcgatgtgtgggcaatggcagcgtggaatgggatggccccgcatcacctcactggaccctgtactctgatggctccagcagcatcctcagcaccaacaacgctaccttccaaaacacggggacctatcgctgcactgagcctggagaccccctgggaggcagcgccgccatccacctctatgtcaaagaccctgcccggccctggaacgtgctagcacaggaggtggtcgtgttcgaggaccaggacgcactactgccctgtctgctcacagacccggtgctggaagcaggcgtctcgctggtgcgtgtgcgtggccggcccctcatgcgccacaccaactactccttctcgccctggcatggcttcaccatccacagggccaagttcattcagagccaggactatcaatgcagtgccctgatgggtggcaggaaggtgatgtccatcagcatccggctgaaagtgcagaaagtcatcccagggcccccagccttgacactggtgcctgcagagctggtgcggattcgaggggaggctgcccagatcgtgtgctcagccagcagcgttgatgttaactttgatgtcttcctccaacacaacaacactaagctcgcaatccctcaacaatctgactttcataataaccgttaccaaaaagtcctgaccctcaacctcgatcaagtagatttccaacatgccggcaactactcctgcgtggccagcaacgtgcagggcaagcactccacctccatgttcttccgggtggtagagagtgcctacttgaacttgagctctgagcagaacctcatccaggaggtgaccgtgggggaggggctcaacctcaaagtcatggtggaggcctacccaggcctgcaaggttttaactggacctacctgggacccttttctgaccaccagcctgagcccaagcttgctaatgctaccaccaaggacacatacaggcacaccttcaccctctctctgccccgcctgaagccctctgaggctggccgctactccttcctggccagaaacccaggaggctggagagctctgacgtttgagctcacccttcgataccccccagaggtaagcgtcatatggacattcatcaacggctctggcacccttttgtgtgctgcctctgggtacccccagcccaacgtgacatggctgcagtgcagtggccacactgataggtgtgatgaggcccaagtgctgcaggtctgggatgacccataccctgaggtcctgagccaggagcccttccacaaggtgacggtgcagagcctgctgactgttgagaccttagagcacaaccaaacctacgagtgcagggcccacaacagcgtggggagtggctcctgggccttcatacccatctctgcaggagcccacacgcatcccccggatgagttcctcttcacaccagtggtggtcgcctgcatgtccatcatggccttgctgctgctgctgctcctgctgctattgtacaagtataagcagaagcccaagtaccaggtccgctggaagatcatcgagagctatgagggcaacagttatactttcatcgaccccacgcagctgccttacaacgagaagtgggagttcccccggaacaacctgcagtttggtaagaccctcggagctggagcctttgggaaggtggtggaggccacggcctttggtctgggcaaggaggatgctgtcctgaaggtggctgtgaagatgctgaagtccacggcccatgctgatgagaaggaggccctcatgtccgagctgaagatcatgagccacctgggccagcacgagaacatcgtcaaccttctgggagcctgtacccatggaggccctgtactggtcatcacggagtactgttgctatggcgacctgctcaactttctgcgaaggaaggctgaggccatgctgggacccagcctgagccccggccaggaccccgagggaggcgtcgactataagaacatccacctcgagaagaaatatgtccgcagggacagtggcttctccagccagggtgtggacacctatgtggagatgaggcctgtctccacttcttcaaatgactccttctctgagcaagacctggacaaggaggatggacggcccctggagctccgggacctgcttcacttctccagccaagtagcccagggcatggccttcctcgcttccaagaattgcatccaccgggacgtggcagcgcgtaacgtgctgttgaccaatggtcatgtggccaagattggggacttcgggctggctagggacatcatgaatgactccaactacattgtcaagggcaatgcccgcctgcctgtgaagtggatggccccagagagcatctttgactgtgtctacacggttcagagcgacgtctggtcctatggcatcctcctctgggagatcttctcacttgggctgaatccctaccctggcatcctggtgaacagcaagttctataaactggtgaaggatggataccaaatggcccagcctgcatttgccccaaagaatatatacagcatcatgcaggcctgctgggccttggagcccacccacagacccaccttccagcagatctgctccttccttcaggagcaggcccaagaggacaggagagagcgggactataccaatctgccgagcagcagcagaagcggtggcagcggcagcagcagcagtgagctggaggaggagagctctagtgagcacctgacctgctgcgagcaaggggatatcgcccagcccttgctgcagcccaacaactatcagttctgctgaggagttgacgacagggagtaccactctcccctcctccaaacttcaactcctccatggatggggcgacacggggagaacatacaaactctgccttcggtcatttcactcaacagctcggcccagctctgaaacttgggaaggtgagggattcaggggaggtcagaggatcccacttcctgagcatgggccatcactgccagtcaggggctgggggctgagccctcaccccccgcctcccctactgttctcatggtgttggcctcgtgtttgctatgccaactagtagaaccttctttcctaatccccttatcttcatggaaatggactgactttatgcctatgaagtccccaggagctacactgatactgagaaaaccaggctctttggggctagacagactggcagagagtgagatctccctctctgagaggagcagcagatgctcacagaccacactcagctcaggccccttggagcaggatggctcctctaagaatctcacaggacctcttagtctctgccctatacgccgccttcactccacagcctcacccctcccacccccatactggtactgctgtaatgagccaagtggcagctaaaagttgggggtgttctgcccagtcccgtcattctgggctagaaggcaggggaccttggcattggctggccacaccaagcaggaagcacaaactcccccaagctgactcatcctaactaacagtcacgccgtgggatgtctctgtccacattaaactaacagcattaatgc

SEQ ID NO: 293 - DNA, 356 bp, Homo sapiens
  3' terminal sequence. friend leukemia virus integration 1 (FLI1) gene.
  modified_base (31): a, t, c or g
  modified_base (106): a, t, c or g
  modified_base (108): a, t, c or g
  modified_base (126): a, t, c or g
  modified_base (182): a, t, c or g
  modified_base (200): a, t, c or g
  modified_base (237): a, t, c or g
  modified_base (256): a, t, c or g
  modified_base (277): a, t, c or g
tttatttagtcaaattattttacaacatggncttctttgacagttgtcagcttaacacttaatatagttaaaaaagtcaacaattacctgcaaaattatatatatntnaatgtctaaaaatatgtngcttatatagagcaggaaaatccctcctctccacaagggaaagtttcgttgttttncccagagctgtgattatngcagtactgttacacgcatttccaaagcattaaaganctaaatgggattatctttnccctgcttgtgtatgcctgtnaaataactgtaccagtggctttgctttctcataggtcagtgacttaaacagccctgtttccttttcggctatagggcat

SEQ ID NO: 294 - DNA, 465 bp, Homo sapiens
  5' terminal sequence. friend leukemia virus integration 1 (FLI1) gene.
  modified_base (369): a, t, c or g
  modified_base (379): a, t, c or g
  modified_base (400): a, t, c or g
  modified_base (409): a, t, c or g
  modified_base (428): a, t, c or g
  modified_base (439): a, t, c or g
  modified_base (454): a, t, c or g
  modified_base (464): a, t, c or g
gaccaaagcagtttcttgtcaatacacggggttcagtatgacacagaatcatggacttaacccgtcatgttctggtttgagatttagtgacaaatagaggtgggaagcttataatctaattttaggaggaccaaattcagtggatggcaactggaacattgattgtaaggccagtgaagttttcacccaactggaatttgatggaaagaaggtttgtgtgtttaagacgccaagggcattgcagaatccctctcagtggacagtatgcactcagctgaccactctctctagccaatagtcaagatatggaactaaggaaattttaatgccaaattacatacattcctgaaagacgggggaattaaattnactaattttntttttttttttttaaatgatngacagtggntccccggaacttgggaaangttgtaggggntttctaaacccaagncgattcgcant

SEQ ID NO: 295 - DNA, 2957 bp, Homo sapiens
  friend leukemia virus integration 1 (FLI1) gene.
gaattcccaaacgtgcacaggggagtgagggcagggcgctcgcagggggcacgcagggagggcccagggcgccagggaggccgcgccgggctaatccgaaggggctgcgaggtcaggctgtaaccgggtcaatgtgtggaatattggggggctcggctgcagacttggccaaatggacgggactattaaggaggctctgtcggtggtgagcgacgaccagtccctctttgactcagcgtacggagcggcagcccatctccccaaggccgacatgactgcctcggggagtcctgactacgggcagccccacaagatcaaccccctcccaccacagcaggagtggatcaatcagccagtgagggtcaacgtcaagcgggagtatgaccacatgaatggatccagggagtctccggtggactgcagcgttagcaaatgcagcaagctggtgggcggaggcgagtccaaccccatgaactacaacagctatatggacgagaagaatggcccccctcctcccaacatgaccaccaacgagaggagagtcatcgtccccgcagaccccacactgtggacacaggagcatgtgaggcaatggctggagtgggccataaaggagtacagcttgatggagatcgacacatcctttttccagaacatggatggcaaggaactgtgtaaaatgaacaaggaggacttcctccgcgccaccaccctctacaacacggaagtgctgttgtcacacctcagttacctcagggaaagttcactgctggcctataatacaacctcccacaccgaccaatcctcacgattgagtgtcaaagaagacccttcttatgactcagtcagaagaggagcttggggcaataacatgaattctggcctcaacaaaagtcctccccttggaggggcacaaacgatcagtaagaatacagagcaacggccccagccagatccgtatcagatcctgggcccgaccagcagtcgcctagccaaccctggaagcgggcagatccagctgtggcaattcctcctggagctgctctccgacagcgccaacgccagctgtatcacctgggaggggaccaacggggagttcaaaatgacggaccccgatgaggtggccaggcgctggggcgagcggaaaagcaagcccaacatgaattacgacaagctgagccgggccctccgttattactatgataaaaacattatgaccaaagtgcacggcaaaagatatgcttacaaatttgacttccacggcattgcccaggctctgcagccacatccgaccgagtcgtccatgtacaagtacccttctgacatctcctacatgccttcctaccatgcccaccagcagaaggtgaactttgtccctccccatccatcctccatgcctgtcacttcctccagcttctttggagccgcatcacaatactggacctcccccacggggggaatctaccccaaccccaacgtcccccgccatcctaacacccacgtgccttcacacttaggcagctactactagaagcttcttctagctgaagcccatcctgcacacttactggatgctttggactcaacaggacatatgtggccttgaagggaagacaaaactggatgttctttcttgttggatagaacctttgtatttgttctttaaaaacattttttttaatgttggtaacttttgcttcctctacctgaacaaagagatgaataattccatgggccagtatgccagtttgaattctcagtctcctagcatcttgtgagttgcatattaagattactggaatggttaagtcatggttctgagaaagaagctgtacgttttctttatgtttttatgaccaaagcagtttcttgtcaatacacggggttcagtatgacacagaatcatggacttaacccgtcatgttctggtttgagatttagtgacaaatagaggtgggaagcttataatctaattttaggaggaccaaattcagcggatggcaactggaacattgattgtaaggccagtgaagttttcacccaactggaatttgatggaaagaaggtttgtgtgtttaagacgccaagggcattgcagaatccctctcagtggacagtatgcactcagctgaccactctctctagaaatagtcaagatatgaactaagaaattttaatgcaaatacatacattcctgaaagacggggaattaaattactaattttttttttttaaatgatgacagtggtcccagaacttggaaaagttgtagggatttctaaactcaagcagattcgcaagtgctgtgcgcttgtcagaccatcagaccagggccaaccaatcagaaggcaacttactgtataaattatgcagagttattttcctatatctcacagtattaaaaaataaataattaaaaattaagaataaataaacgagttgacctcggtcacaaaagcagttttactatcgaatcaatcgctgttatttttttttaatgtaatttgtacatcttttttcaatctgtacatttgggctgtcttgtatgtttttatgctcctttttaaaaagcataatatgcctatagctgaaaaggaaacagggctgtttaagtcactgacttatgagaaagcaaagcactggtacagttatttaacaggcatacacaagcagggaaaagataatccatttagatctttaatgctttggaaatgcgtgtaacagtactgcaataatcacagctctgggaaaaacaacgaaactttcccttgtggagaggagggattttcctgctctatataagcaacatatttttagacattaaaatatatataattttgcaggtaattgttgacttttttaactatattaagtgttaagctgacaactgtcaaagaagaccatgttgtaaaataatttgactaaataaatggttccttctctcaaaaaaaaaaaaa

SEQ ID NO: 296 - DNA, 399 bp, Homo sapiens
  3' terminal sequence. ests, highly similar to tvhume hepatocyte growth factor receptor precursor [h.sapiens] (EST R97218) gene.
  modified_base (118): a, t, c or g
caccccttctcttcacagatcacgaagatcccattgaatggcttgggctgcagacatttccagtcctgcagtcaatgcctctctgccccaccctttgttcagtgtggctggtgcagancaaatgtgtgcgatcggaggaatgcctgagcgggacatggactcaacagatctgtctgcctgcaatctacaaggtaggaatctctaacagctggcatacatgtttttgtttggtgttttttttttttttttggtttggtttggtttgttttttgtttttttagatacaaatcccactaatgaaaaaaatttaaaaatcaatttactcatttaggctgtgaggtcatcaggctaaagcaccatctctctcttgggctttatccctggggcaggggagggggg

SEQ ID NO: 297 - DNA, 464 bp, Homo sapiens
  5' terminal sequence. ests, highly similar to tvhume hepatocyte growth factor receptor precursor [H. sapiens] (EST R97218) gene.
  modified_base (397): a, t, c or g
  modified_base (411): a, t, c or g
  modified_base (420): a, t, c or g
  modified_base (445): a, t, c or g
cgtggtagattttcatagtgccgaatatatgcttaagcaaataaggcaacacagttagcatggctgcgatgttagccaatgtccattgccagaaactgagttctctatcagcaagagatgtgctcatcttgttctggactatatctcctcagggactagagggcagcctgctaaatggtatgcactcaataaatatttttggaatgaattaaagagtggcatggcttacagaagtatagatgttagtatagtcatccgttgagcctttgcttttttttctgggaacactgaaggaagactcacagccacccatgggtgtttgaccctccacttgccttgcccacctcaccccgggaaataatcttcagtctcatctgtggaacagacaaggccaccntctatggcttcggnacaggtagnaaaactgtcctgtgtggccccgctnggcagggatcaccagtttg

SEQ ID NO: 298 - DNA, 378 bp, Homo sapiens
  3' terminal sequence. ets variant gene 5 (ets-related molecule) (ETV5) gene.
  modified_base (253): a, t, c or g
  modified_base (349): a, t, c or g
  modified_base (362): a, t, c or g
aaataccaaaactacaaaaatcagtttataaactgtttttccaaaacaaccaccaaaacaaaacaatcccccaaatcagggcaaaacaaaatactgtcaaaagtgttaatcgcccttctcctaaaataaaagtcatccacactcagccacgtgattgggaagagaaagggggcttgctctacttggcgaccacatggccgggtggttcccaagagtagccatggtttatgattttgagaaccacggagggggnaaacagctgttctgactgcccccctttttctagacaaggggtaatatttcagattcagctagaagagctttccaatgtttaagatgtatttttaanccttaatggtttnaggcctccccaacttt

SEQ ID NO: 299 - DNA, 317 bp, Homo sapiens
  5' terminal sequence. ets variant gene 5 (ets-related molecule) (ETV5) gene.
actggaagaggttgctcggcgctggggcatccagaagaaccggccagccatgaactatgacaagctgagccgctctctccgctattactatgaaaagggcatcatgcagaaggtggctggagagcgatacgtctacaaatttgtctgtgacccagatgccctcttctccatggctttcccggataaccagcgtccgttcctgaaggcagagtccgagtgccacctcagcgaggaggacaccctgccgctgacccactttgaagacagccccgcttacctcctggacatggaccgctgcagcagcctcccctatgccg

SEQ ID NO: 300 - DNA, 4071 bp, Homo sapiens
  ets variant gene 5 (ets-related molecule) (ETV5) gene.
gagtccagccgctggtgcgcggagcggttcaccgtcttcggagcggttcggcccagcctttcgcccaggcgcccaggcccgctgcgcgcgtgcgtgagcgcgcctgcgccgccagggccgctgcaaggggaggagagcggccgcctcaggaggatcccttttcccccagaaattactcaatgctgaaacctctcaaagtggtattagagacgctgaaagcaccatggacgggttttatgatcagcaagtcccttttatggtcccagggaaatctcgatctgaggaatgcagagggcggcctgtgattgacagaaagaggaagtttttggacacagatctggctcacgattctgaagagctatttcaggatctcagtcaacttcaagaggcttggttagctgaagcacaagttcctgatgatgaacagtttgtcccagattttcagtctgataacctggtgcttcatgccccacctccaaccaagatcaaacgggagctgcacagcccctcctctgagctgtcgtcttgtagccatgagcaggctcttggtgctaactatggagaaaagtgcctctacaactattgtgcctatgataggaagcctccctctgggttcaagccattaacccctcctacaacccccctctcacccacccatcagaatcccctatttcccccacctcaggcaactctgcccacctcagggcatgcccctgcagctggcccagttcaaggtgtgggccccgcccccgccccccattcgcttccagagcctggaccacagcagcaaacatttgcggtcccccgaccaccacatcagcccctgcagatgccaaagatgatgcctgaaaaccagtatccatcagaacagagatttcagagacaactgtctgaaccctgccaccccttccctcctcagccaggagttcctggagataatcgccccagttaccatcggcaaatgtcagaacctattgtccctgcagctcccccgccccctcagggattcaaacaagaataccatgacccactctatgaacatggggtcccgggcatgccagggcccccagcacacgggttccagtcaccaatgggaatcaagcaggagcctcgggattactgcgtcgattcagaagtgcctaactgccagtcatcctacatgagagggggttatttctccagcagccatgaaggtttttcatatgaaaaagatccccgattatactttgacgacacttgtgttgtgcctgagagactggaaggcaaagtcaaacaggagcctaccatgtatcgagaggggcccccttaccagaggcgaggttcccttcagctgtggcagttcctggtcacccttcttgatgacccagccaatgcccacttcattgcctggacaggtcgaggcatggagttcaagctgatagaaccggaagaggttgctcggcgctggggcatccagaagaaccggccagccatgaactatgacaagctgagccgctctctccgctattactatgaaaagggcatcatgcagaaggtggctggagagcgatacgtctacaaatttgtctgtgacccagatgccctcttctccatggctttcccggataaccagcgtccgttcctgaaggcagagtccgagtgccacctcagcgaggaggacaccctgccgctgacccactttgaagacagccccgcttacctcctggacatggaccgctgcagcagcctcccctatgccgaaggctttgcttactaagtttctgagtggcggagtggccaaaccctagagctagcagttcccattcaggcaaacaagggcagtggttttgtttgtgtttttggttgttcctaaagcttgccctttgagtattatctggagaacccaagctgtctctggattggcacccttaaagacagatacattggctggggagtgggaacagggaggggcagaaaaccaccaaaaggccagtgcctcaactcttgattctgatgaggtttctgggaagagatcaaaatggagtctccttaccatggacaatacatgcaaagcaatatcttgttcaggttagtacccgcaaaacgggacatgatgtgacaatctcgatcgatcatggactactaaatggcctttacatagaagggctctgatttgcacaatttgttgaaaaatcacaaacccatagaaaagtgagtaggctaagttggggaggctcaaaccattaagggttaaaaatacatcttaaacattggaaagctcttctagctgaatctgaaatattaccccttgtctagaaaaaggggggcagtcagaacagctgttccccactccgtgttctcaaaatcataaaccatggctactcttgggaaccacccggccatgtggtcgccaagtagagcaagccccctttctcttcccaatcacgtggctgagtgtggatgacttttattttaggagaagggcgattaacacttttgacagtattttgttttgccctgatttgggggattgttttgttttggtggttgttttggaaaaacagtttataaactgatttttgtagttttggtatttaaagcaaaaaaacgaaaaacaaaaaacaaaaacaaaccttttggtaatgtgcactgtgtctttagccagggccgtgcaacttatgaagacactgcagcttgagaggggctttgctgaggcttccccttggccatgtgaaagcccgccttgttgcctgctttgtgctttctgcaccagacaacctgatggaacatttgcacctgagttgtacatttttgaagtgtgcagggcagcctggacacaagcttagattctctatgtatagttccccgtgttcactaacatgccctctctggaaagcatatgtatataacatgtgtcatgtcctttggaaacctggtcacctggtgaaaacccttgggattcttccctgggcatgactgatgacaatttccatttcatcagtttgttttgttttcctttttctttaaatcttggactttaaaccctacctgtgtgattcagtagggtttgagacttagctgtgatactgacaggtaagcaacagtgctagcattctagattcctgcctttttttaaaaagaaattattctcattgctgtattatattggaaaagttttaaacaaccaagctaaagctatgtgaaagttgagctcaaagtagaggaaaagttactggtggtaccttgctgcctgctctgctggtagaattctgtgctccccgtgacacttagtacattaagaatgactacactgttcctcgtatgtgaaggaggcagtgctgactccgtgagtgtgagacacgtgctttgaactgcttttctattcatggagcactccatagtctcaaactgtcccccttatgaccaacagcacatttgtgaagaggttcgcagggataaggggtgcactttatagctatggaaacatgagattctcctctattggaagctaattagcccacaaaggtggtaaacctgtagattgggccttaattagcattgtactctaatcaaaggactctttctaaaccatatttatagctttcttaacctacacatagtctatacatagatgcatattttacccccagctggctagagatttatttgttgtaaatgctgtatagatttggttttcctttctttacttaccctggtttggattttttttttttttttttttgaatggatttatgctgtcttagcaatatgacaataatcctctgtagcttgagctacccctcccctgctgtaacttacgtgacctgtgctgtcactgggcataggacagcggcatcacggttgcattcccattggactcatgcacctcccggatggtttttgtttttttcgggggttctttggggtttgtttgtttgcttcttttccagagtgtggaaagtctacagtgcagaaaggcttgaacctgccagctgatttgaaatactttcaccctgcgcagggccgtatgcatcctgccaagctgcgttatattctgtactgtgtacaataaagaagtttgcttttcgttta

SEQ ID NO: 301 - DNA, 407 bp, Homo sapiens
  3' terminal sequence. cyclin-dependent kinase 4 (CDK4) gene.
  modified_base (1): a, t, c or g
  modified_base (4): a, t, c or g
  modified_base (106): a, t, c or g
  modified_base (186): a, t, c or g
  modified_base (198): a, t, c or g
  modified_base (212): a, t, c or g
  modified_base (216): a, t, c or g
  modified_base (337): a, t, c or g
  modified_base (361): a, t, c or g
  modified_base (391): a, t, c or g
  modified_base (402): a, t, c or g
nccngtataaaaaaggaccccaaatataaaggtagggaaagggacaagagggaacataccccttagtgtagagaaatgggaaggagaaggagaagcctcaaaaggngaggtgggaggggaatgtcattaaggcagcaaagtaatctctgtagaaagatggaggaggaccctccatagcctcagagntaaaggcaaagnttgccctctcagtntccngaagggaaatggcagcttttcttccttccatgggcagccactccattgctcactccggattaccttcatccttatgtaggataagggtgctgcagagctcgaaagggcagagattcgcttntgtggggttaaaagtcagcctttncccgcagcagctttgcttccccgactcctnccttttcaggnacccc

SEQ ID NO: 302 - DNA, 405 bp, Homo sapiens
  5' terminal sequence. cyclin-dependent kinase 4 (CDK4) gene.
  modified_base (6): a, t, c or g
  modified_base (346): a, t, c or g
  modified_base (380): a, t, c or g
  modified_base (387): a, t, c or g
attcgncacagaggaggaggtggaggaggccttcccatcagcacagttcgtgaggtggctttactgaggcgactggaggcttttgagcatcccaatgttgtccggctgatggacgtctgtgccacatcccgaactgaccgggagatcaaggtaaccctggtgtttgagcatgtagaccaggacctaaggacatatctggacaaggcacccccaccaggcttgccagccgaaacgatcaaggatctgatgcgccagtttctaagaggcctagatttccttcatgccaattgcatcgttcaccgaggatctgaagccagagaacattctgggtgacaagtggttggancagtcaagctggctggactttgggcctgggcagnaatctancagcttaccagatgggca

SEQ ID NO: 303 - DNA, 420 bp, Homo sapiens
  3' terminal sequence. v-yes-1 yamaguchi sarcoma viral oncogene homolog 1 (YES1) gene.
  modified_base (236): a, t, c or g
  modified_base (246): a, t, c or g
  modified_base (318): a, t, c or g
  modified_base (326): a, t, c or g
  modified_base (361): a, t, c or g
  modified_base (371): a, t, c or g
  modified_base (411): a, t, c or g
  modified_base (416): a, t, c or g
caatgagaactttttatttcaattatccacaaaacaatattacaatactttataaaaatattaagtttaggctaccattattcatttaaaaaagtgtgctagaaggctgtttttgccaacttccttttttggtaagggttaacttccacattaagacactgaagacgaaaagctgttggtaaaatatctccaaatttacaaagttgtttttcttgggcaatttaaaaatacaggancaatttaaantgaatacacattaaggttaggtgttttatccctactatacaattgttattatatagggaactgctcccttcnggttaaanccctaatggaatacccatcaacttttcccggcccntactttcccnggattggggtttagggtacctaaacgggaaatttaggtcnccccntttg

SEQ ID NO: 304 - DNA, 4517 bp, Homo sapiens
  v-yes-1 yamaguchi sarcoma viral oncogene homolog 1 (YES1) gene.
gcggagccaaggcacacgggtctgacccttgggccggcccggagcaagtgacacggaccggtcgcctatcctgaccacagcaaagcggcccggagcccgcggaggggacctgacgggggcgtaggcgccggaaggctgggggccccggagccgggccggcgtggcccgagttccggtgagcggacggcggcgcgcgcagatttgataatgggctgcattaaaagtaaagaaaacaaaagtccagccattaaatacagacctgaaaatactccagagcctgtcagtacaagtgtgagccattatggagcagaacccactacagtgtcaccatgtccgtcatcttcagcaaagggaacagcagttaatttcagcagtctttccatgacaccatttggaggatcctcaggggtaacgccttttggaggtgcatcttcctcattttcagtggtgccaagttcatatcctgctggtttaacaggtggtgttactatatttgtggccttatatgattatgaagctagaactacagaagacctttcatttaagaagggtgaaagatttcaaataattaacaatacggaaggagattggtgggaagcaagatcaatcgctacaggaaagaatggttatatcccgagcaattatgtagcgcctgcagattccattcaggcagaagaatggtattttggcaaaatggggagaaaagatgctgaaagattacttttgaatcctggaaatcaacgaggtattttcttagtaagagagagtgaaacaactaaaggtgcttattccctttctattcgtgattgggatgagataaggggtgacaatgtgaaacactacaaaattaggaaacttgacaatggtggatactatatcacaaccagagcacaatttgatactctgcagaaattggtgaaacactacacagaacatgctgatggtttatgccacaagttgacaactgtgtgtccaactgtgaaacctcagactcaaggtctagcaaaagatgcttgggaaatccctcgagaatctttgcgactagaggttaaactaggacaaggatgtttcggcgaagtgtggatgggaacatggaatggaaccacgaaagtagcaatcaaaacactaaaaccaggtacaatgatgccagaagctttccttcaagaagctcagataatgaaaaaattaagacatgataaacttgttccactatatgctgttgtttctgaagaaccaatttacattgtcactgaatttatgtcaaaaggaagcttattagatttccttaaggaaggagatggaaagtatttgaagcttccacagctggttgatatggctgctcagattgctgatggtatggcatatattgaaagaatgaactatattcaccgagatcttcgggctgctaatattcttgtaggagaaaatcttgtgtgcaaaatagcagactttggtttagcaaggttaattgaagacaatgaatacacagcaagacaaggtgcaaaatttccaatcaaatggacagctcctgaagctgcactgtatggtcggtttacaataaagtctgatgtctggtcatttggaattctgcaaacagaactagtaacaaagggccgagtgccatatccaggtatggtgaaccgtgaagtactagaacaagtggagcgaggatacaggatgccgtgccctcagggctgtccagaatccctccatgaattgatgaatctgtgttggaagaaggaccctgatgaaagaccaacatttgaatatattcagtccttcttggaagactacttcactgctacagagccacagtaccagccaggagaaaatttataattcaagtagcctattttatatgcacaaatctgccaaaatataaagaacttgtgtagattttctacaggaatcaaaagaagaaaatcttctttactctgcatgtttttaatggtaaactggaatcccagatatggttgcacaaaaccacttttttttccccaagtattaaactctaatgtaccaatgatgaatttatcagcgtatttcagggtccaaacaaaatagagctaagatactgatgacagtgtgggtgacagcatggtaatgaaggacagtgaggctcctgcttatttataaatcatttcctttctttttttccccaaagtcagaattgctcaaagaaaattatttattgttacagataaaacttgagagataaaaagctataccataataaaatctaaaattaaggaatatcatgggaccaaataattccattccagttttttaaagtttcttgcatttattattctcaaaagttttttctaagttaaacagtcagtatgcaatcttaatatatgctttcttttgcatggacatgggccaggtttttcaaaaggaatataaacaggatctcaaacttgattaaatgttagaccacagaagtggaatttgaaagtataatgcagtacattaatattcatgttcatggaactgaaagaataagaactttttcacttcagtccttttctgaagagtttgacttagaataatgaaggtaactagaaagtgagttaatcttgtatgaggttgcattgattttttaaggcaatatataattgaaactactgtccaatcaaaggggaaatgttttgatctttagatagcatgcaaagtaagacccagcattttaaaagcccttttttaaaaactagacttcgtactgtgagtattgcttatatgtccttatggggatgggtgccacaaatagaaaatatgaccagatcagggacttgaatgcacttttgctcatggtgaatatagatgaacagagaggaaaatgtatttaaaagaaatacgagaaaagaaaatgtgaaagttttacaagttagagggatggaaggtaatgtttaatgttgatgtcatggagtgacagaatggctttgctggcactcagagctcctcacttagctatattctgagactttgaagagttataaagtataactataaaactaatttttcttacacactaaatgggtatttgttcaaaataatgaagttatggcttcacattcattgcagtgggatatggtttttatgtaaaacatttttagaactccagttttcaaatcatgtttgaatctacattcacttttttttgttttcttttttgagacggagtctcgctctgccgcccaggctggagtgcagtggcgcgatctcggctcactgcaagctctgcctcccaggttcacaccattctcctgcctcagcctcccgagtagctgggactacaggtgcccaccaccacgcctggctagttttttgtatttttagtagagacgcagtttcaccgtgttagccaggatggtctcgatctcctgaccttgtgatctgcccgcctcggcctcccaaagtgctgggattacaggtgtgagccaccgcgcccagcctacattcacttctaaagtctatgtaatggtggtcattttttcccttttagaatacattaaatggttgatttggggaggaaaacttattctgaatattaacggtggtgaaaaggggacagtttttaccctaaagtgcaaaagtgaaacatacaaaataagactaatttttaagagtaactcagtaatttcaaaatacagatttgaatagcagcattagtggtttgagtgtctagcaaaggaaaaattgatgaataaaatgaaggtctggtgtatatgttttaaaatactctcatatagtcacactttaaattaagccttatattaggcccctctattttcaggatataattcttaactatcattatttacctgattttaatcatcagattcgaaattctgtgccatggcgtatatgttcaaattcaaaccatttttaaaatgtgaagatggacttcatgcaagttggcagtggttctggtactaaaaattgtggttgttttttctgtttacgtaacctgcttagtattgacactctctaccaagagggtcttcctaagaagagtgctgtcattatttcctcttatcaacaacttgtgacatgagattttttaagggctttatgtgaactatgatattgtaatttttctaagcatattcaaaagggtgacaaaattacgtttatgtactaaatctaatcaggaaagtaaggcaggaaaagttgatggtattcattaggttttaactgaatggagcagttccttatataataacaattgtatagtagggataaaacactaacaatgtgtattcattttaaattgttctgtatttttaaattgccaagaaaaacaactttgtaaatttggagatattttccaacagcttttcgtcttcagtgtcttaatgtggaagttaacccttaccaaaaaaggaagttggcaaaaacagccttctagcacacttttttaaatgaataatggtagcctaaacttaatatttttataaagtattgtaatattgttttgtggataattgaaataaaaagttctcattgaatgcacc

SEQ ID NO: 305 - DNA, 459 bp, Homo sapiens
  3' terminal sequence. interferon-induced protein 75, 52kd (IFI75) gene.
  modified_base (1): a, t, c or g
  modified_base (224): a, t, c or g
  modified_base (406): a, t, c or g
  modified_base (412): a, t, c or g
  modified_base (423): a, t, c or g
  modified_base (428): a, t, c or g
  modified_base (455): a, t, c or g
ncttgtctgaaggtgtgctggacacctcctggggctcttctgggtcatttggttctggagaattatctcttatctctggcatagagcccaagggagagtggggcatctcttgagggtcttctttatctcttatttgggggatcaggttgtcactggccacttgcacagtgctagtgaggaggctgggcatctcttctgagtcttctttcgcattcattttggangttaacttgtcattggtcactgaagtgcttcttccttcctgggatgagtgcagggagaggcaggacagggtcagatgggctgggcgactcactcaggatctcatcgctttgctgggaggatgttccagggctcactgactcttgggcgcacaaggtgaaacagcttggtttgaagggggttnttggtngggggcaagcncaatngggtatggaaggaagcttccctctaanaagg

SEQ ID NO: 306 - DNA, 370 bp, Homo sapiens
  5' terminal sequence. interferon-induced protein 75, 52kd (IFI75) gene.
  modified_base (102): a, t, c or g
  modified_base (365): a, t, c or g
tgcgtttgtcaaagcacagacttcctgttttgcctgctagcatctccctgtaactctcccaatcttgaggagtgatccctgtcccagcccctggaaaggganggaaacgacaaactcaaagtccaggatgttcaccatgacaagagccatggaagaggctctttttcagcacttcatgcaccagaagctggggatcgcctatgccatacacaagccatttcccttctttgaaggcctcctagacaactccatcatcactaagagaatgtacatggaatctctggaagcctgtagaaatttgatccctgtatccagagtggtgcacaacattctcacccaactgggagaggactttttaacctgtnctctt

SEQ ID NO: 307 - DNA, 1541 bp, Homo sapiens
  interferon-induced protein 75, 52kd (IFI75) gene.
aattccggcatcgctttgctgggaggatgttccaggctcactgactcttggcgcacagggtgaacagcttggttgagtcgcccagcccatctgaccctgtcctgcctctccctgcactcatccaggaaggaagaagcacttcagtgaccaatgacaagttaacatccaaaatgaatgcggaagaagactcagaagagatgcccagcctcctcactagcactgtgcaagtggccagtgacaacctgatcccccaaataagagataaagaagaccctcaagagatgccccactctcccttgggctctatgccagagataagagataattctccagaaccaaatgacccagaagagccccaggaggtgtccagcacaccttcagacaagaaaggaaagaaaagaaaaagatgtatctggtcaactccaaaaaggagacataagaaaaaaagcctcccaagagggacagcctcatctagacacggaatccaaaagaagctcaaaagggtggatcaggttcctcaaaagaaagatgactcaacttgtaactccacggtagagacaagggcccaaaaggcgagaactgaatgtgcccgaaagtcgagatcagaggagatcattgatggcacttcagaaatgaatgaaggaaagaggtcccagaagacgcctagtacaccacgaagggtcacacaaggggcagcctcacctgggcatggcatccaagagaagctccaagtggtggataaggtgactcaaaggaaagacgactcaacctggaactcagaggtcatgatgagggtccaaaaggcaagaactaaatgtgcccgaaagtccagatcgaaagaaaagaaaaaggagaaagatatctgttcaagctcaaaaaggagatttcagaaaaatattcaccgaagaggaaaacccaaaagtgacactgtggattttcactgttctaagctccccgtgacctgtggtgaggcgaaagggattttatataagaagaaaatgaaacacggatcctcagtgaagtgcattcggaatgaggatggaacttggttaacaccaaatgaatttgaagtcgaaggaaaaggaaggaacgcaaagaactggaaacggaatatacgttgtgaaggaatgaccctaggagagctgctgaagcggaaaaactcggatgaatgcgaggtgtgctgtcaagggggacaacttctctgctgcggtacttgtccacgagtcttccatgaggactgtcacatcccccctgtggaagccaagaggatgctgtggagttgcaccttctgcaggatgaagaggtcttcaggaagccaacagtgccatcatgtatctaagaccctggagaggcagatgcagcctcaggaccagctgaatgtgagttcctcctcttgaaggcctactgtcatccacaaagctccttttttacgggcatcccatttaatattcgagattacggtgagcctttcaggaagcaatgtggttggacctggttaagggaaaggctgattacggaaatgtacacggtggcccggaatt

SEQ ID NO: 308 - DNA, 416 bp, Homo sapiens
  3' terminal sequence. v-myb avian myeloblastosis viral oncogene homolog-like 2 (MYBL2) gene.
  modified_base (5): a, t, c or g
  modified_base (6): a, t, c or g
  modified_base (8): a, t, c or g
  modified_base (10): a, t, c or g
  modified_base (12): a, t, c or g
  modified_base (13): a, t, c or g
  modified_base (129): a, t, c or g
  modified_base (364): a, t, c or g
  modified_base (413): a, t, c or g
gttanncnantnnattttttaagagagaggcaattttattcttccaaaaaaatgcaccagagagggtgagcacaggagcacccctggccacatcccccatcctaagcagggtctgagatgaggccaggnctgacgtgggcttgggagaagctgacggagctccctgtggccttggggagggaaccaggcagacctgggaagtggaactttgttgttagcaccaggagccgcccacagctgggcttcggcaacagggcagcacatggccctgttccttccacctgagagtctggggaggggctggtggcagaaggctccctgcaggaggttcacctgaatgactctcagattcacagaccccctnttgcccccacaacccctgtaaacatgagaatggggctcgtgacaccctnaac

SEQ ID NO: 309 - DNA, 426 bp, Homo sapiens
  5' terminal sequence. v-myb avian myeloblastosis viral oncogene homolog-like 2 (MYBL2) gene.
gaactcatcatcgaggacgacatcaggcccgagaagcagaagaggaagcctgggctgcggcggacccattcaagaaagtccggaagtctctggctcttgacattgtggatgaggatatgaagctgatgatgtccacactgcccaagtctctatccttgccgacaactgccccttcaaactcttccagcctcaccctgtcaggtatcaaagaagacaacagcttgctcaaccagggcttcttgcaggccaagcccgagaaggcagcagtggcccagaagccccgaagccacttcacgacacctgcccctatgtccagtgcctgggaagacggtggcctgcggggggaccaggggaccagcttttcatggcaggagaaagcccggcagcttctggggccgcttgaagcccagccacacttttcgggac

SEQ ID NO: 310 - DNA, 2627 bp, Homo sapiens
  v-myb avian myeloblastosis viral oncogene homolog-like 2 (MYBL2) gene.
gctgacgccttcgagcgcggcccggggcccggagcggccggagcagcccgggtcctgaccccggcccggctcccgctccgggctctgccggcgggcgggcgagcgcggcgcggtccgggccggggggatgtctcggcggacgcgctgcgaggatctggatgagctgcactaccaggacacagattcagatgtgccggagcagagggatagcaagtgcaaggtcaaatggacccatgaggaggacgagcagctgagggccctggtgaggcagtttggacagcaggactggaagttcctggccagccacttccctaaccgcactgaccagcaatgccagtacaggtggctgagagttttgaatccagaccttgtcaaggggccatggaccaaagaggaagaccaaaaagtcatcgagctggttaagaagtatggcacaaagcagtggacactgattgccaagcacctgaagggccggctggggaagcagtgccgtgaacgctggcacaaccacctcaaccctgaggtgaagaagtcttgctggaccgaggaggaggaccgcatcatctgcgaggcccacaaggtgctgggcaaccgctgggccgagatcgccaagatgttgccagggaggacagacaatgctgtgaagaatcactggaactctaccatcaaaaggaaggtggacacaggaggcttcttgagcgagtccaaagactgcaagcccccagtgtacttgctgctggagctcgaggacaaggacggcctccagagtgcccagcccacggaaggccagggaagtcttctgaccaactggccctccgtccctcctaccataaaggaggaggaaaacagtgaggaggaacttgcagcagccaccacatcgaaggaacaggagcccatcggtacagatctggacgcagtgcgaacaccagagcccttggaggaattcccgaagcgtgaggaccaggaaggctccccaccagaaacgagcctgccttacaagtgggtggtggaggcagctaacctcctcatccccgctgtgggttctagcctctctgaagccctggacttgatcgagtcggaccctgatgcttggtgtgacctgagtaaatttgacctccctgaggaaccatctgcagaggacagtatcaacaacagcctagtgcagctgcaagcgtcacatcagcagcaagtcctgccaccccgccagccttccgccctggtgcccagtgtgaccgagtaccgcctggatggccacaccatctcagacctgagccggagcagccggggcgagctgatccccatctcccccagcactgaagtcgggggctctggcattggcacaccgccctctgtgctcaagcggcagaggaagaggcgtgtggctctgtcccctgtcactgagaatagcaccagtctgtccttcctggattcctgtaacagcctcacgcccaagagcacacctgttaagaccctgcccttctcgccctcccagtttctgaacttctggaacaaacaggacacattggagctggagagcccctcgctgacatccaccccagtgtgcagccagaaggtggtggtcaccacaccactgcaccgggacaagacacccctgcaccagaaacatgctgcgtttgtaaccccagatcagaagtactccatggacaacactccccacacgccaaccccgttcaagaacgccctggagaagtacggacccctgaagcccctgccacagaccccgcacctggaggaggacttgaaggaggtgctgcgttctgaggctggcatcgaactcatcatcgaggacgacatcaggcccgagaagcagaagaggaagcctgggctgcggcggagccccatcaagaaagtccggaagtctctggctcttgacattgtggatgaggatgtgaagctgatgatgtccacactgcccaagtctctatccttgccgacaactgccccttcaaactcttccagcctcaccctgtcaggtatcaaagaagacaacagcttgctcaaccagggcttcttgcaggccaagcccgagaaggcagcagtggcccagaagccccgaagccacttcacgacacctgcccctatgtccagtgcctggaagacggtggcctgcggggggaccagggaccagcttttcatgcaggagaaagcccggcagctcctgggccgcctgaagcccagccacacatctcggaccctcatcttgtcctgaggtgttgagggtgtcacgagcccattctcatgtttacaggggttgtgggggcagagggggtctgtgaatctgagagtcattcaggtgacctcctgcagggagccttctgccaccagcccctccccagactctcaggtggaggcaacagggccatgtgctgccctgttgccgagcccagctgtgggcggctcctggtgctaacaacaaagttccacttccaggtctgcctggttccctccccaaggccacagggagctccgtcagcttctcccaagcccacgtcaggcctggcctcatctcagaccctgcttaggatgggggatgtggccaggggtgctcctgtgctcaccctctcttggtgcatttttttggaagaataaaattgcctctctctttg

SEQ ID NO: 311 - DNA, 442 bp, Homo sapiens
  3' terminal sequence. transforming growth factor, beta receptor iii (betaglycan, 300kd) (TGFBR3) gene.
  modified_base (383): a, t, c or g
cccagactcaaggagttggtaaagggttaatagccagatagtagaaccagtgaggagatgcggccaaagattctttatatctgaaccaagatgtaaaacaagaaatgctttgaggctttctaagcgatcctcctgtctaatttgcacctttgtctggatgcacacttctgaccttgctgccacaacctgtggggttctgatgtgtcccttgatgggtgctgccctcagggactgcaccctgacaagtgttaaggcaacattcctttcttgtgcccggggccaaaaccaatgctgatgaccttatcagcttcctgtttcttcccatacttgcatacaccactggcaaaatgtcttaatggcaaattttgtatttcttacagggnctacaggaaatttgaaaatggaccaaattcagggaaccacaggttttgtggcccatttc

SEQ ID NO: 312 - DNA, 315 bp, Homo sapiens
  5' terminal sequence. transforming growth factor, beta receptor iii (betaglycan, 300kd) (TGFBR3) gene.
  modified_base (175): a, t, c or g
taacaaggaggtatcactgagcttattttagctgcaaagtggcatcatattattccatttaatgaaattcacctcaagccctttttgacatattaaatatatgggatatatttaaggcaagagaagtaaggcaatccaaatgagtgcccttttccaatctcagcactgtcttggnggaattggtgacactattcagataaccaactggagaccgacagatttgccatgcatttgcatcttgctagagtttggtttttatgaaagggcctatttttttttaagttgacatattttgagtgggaaacactcacccta

SEQ ID NO: 313 - DNA, 4208 bp, Homo sapiens
  transforming growth factor, beta receptor iii (betaglycan, 300kd) (TGFBR3) gene.
tctttaagatttgtagctactaagaaagaaaggagctttttttccttgggccttcaaactgaaagaaccgcatgagcctgacggcgcatggtcttaacatcaggctgtgcaggaagaagctatctgcagatggatgccagcacacacaaggaagcagagctctggcaacattgagtcaaagcaaggacacaacatcagagggacggcagagaatccttgtgtgtagtctttggtggcagtttgaaaattgcaaggagggactttaagactacttctgatttgcaaagatggtctgtgctccgagcaggctaaagtgactggacgagacgcactgttggagaaataaaaatgacttcccattatgtgattgccatctttgccctgatgagcttctgtttagccactgcaggtccagagcctggtgcactgtgtgaactgtcacctgtcagtgcctcccatcctgtccaggccttgatggagagcttcactgttttgtcaggctgtgccagcagaggcacaactgggctgccacaggaggtgcatgtcctgaatctcgcactgcgccaggggcctggccagctacagagagaggtcacacttcacctgaatcccatctcctcagtccacatccaccacaagtctgttgtgttcctgctcaactccccacaccccctggtgtggcatctgaagacagagagacttgccactggggtctccagactgtttttggtgtctgagggttctgtggtccagttttcatcagcaaacttctccttgacagcagaaacagaagaaaggaacttcccccatggaaatgaacatctgttaaattgggcccgaaaagagtatggagcagttacttcattcaccgaactcaagatagcaagaaacatttatattaaagtgggggaagatcaagtgttccctccaaagtgcaacatagggaagaattttctctcactcaattaccttgctgagtaccttcaacccaaagcagcagaagggtgtgtgatgtccagccagccccagaatgaggaagtacacatcatcgagctaatcacccccaactctaacccctacagtgctttccaggtggatataacaattgatataagaccttctcaagaggatcttgaagtggtcaaaaatctcatcctgatcttgaagtgcaaaaagtctgtcaactgggtgatcaaatcttttgatgttaagggaagcctgaaaattattgctcctaacagtattggctttggaaaagagagtgaaagatctatgacaatgaccaaatcaataagagatgacattccttcaacccaagggaatctggtgaagtgggctttggacaatggctatagtccaataacttcatacacaatggctcctgtggcaatagtatttcatcttcggcttgaaaataatgaggagatgggagatgaggaagtccacactattcctcctgagctacggatcctgctggaccctggtgccctgcctgccctgcagaacccgcccatccggggaggggaaggccaaaatggaggccttccgtttcctttcccagatatttccaggagagtctggaatgaagagggagaagatgggctccctcggccaaaggaccctgtcattcccagcatacaactgtttcctggtctcagagagccagaagaggtgcaagggagcgtggatattgccctgtctgtcaaatgtgacaatgagaagatgatcgtggctgtagaaaaagattcttttcaggccagtggctactcggggatggacgtcaccctgttggatcctacctgcaaggccaagatgaatggcacacactttgttttggagtctcctctgaatggctgcggtactcggccccggtggtcagcccttgatggtgtggtctactataactccattgtgatacaggttccagcccttggggacagtagtggttggccagatggttatgaagatctggagtcaggtgataatggatttccgggagatatggatgaaggagatgcttccctgttcacccgacctgaaatcgtggtgtttaattgcagccttcagcaggtgaggaaccccagcagcttccaggaacagccccacggaaacatcaccttcaacatggagctatacaacactgacctctttttggtgccctcccagggcgtcttctctgtgccagagaatggacacgtttatgttgaggtatctgttactaaggctgaacaagaactgggatttgccatccaaacgtgctttatctctccatattcgaaccctgataggatgtctcattacaccattattgagaatatttgtcctaaagatgaatctgtgaaattctacagtcccaagagagtgcacttccctatcccgcaagctgacatggataagaagcgattcagctttgtcttcaagcctgtcttcaacacctcactgctctttctacagtgtgagctgacgctgtgtacgaagatggagaagcacccccagaagttgcctaagtgtgtgcctcctgacgaagcctgcacctcgctggacgcctcgataatctgggccatgatgcagaataagaagacgttcaccaagccccttgctgtgatccaccatgaagcagaatctaaagaaaaaggtccaagcatgaaggaaccaaatccaatttctccaccaattttccatggtctggacaccctaaccgtgatgggcattgcgtttgcagcctttgtgatcggagcactcctgacgggggccttgtggtacatctattctcacacaggggagacagcaggaaggcagcaagtccccacctccccgccagcctcggaaaacagcagtgctgcccacagcatcggcagcacgcagagcacgccttgctccagcagcagcacggcctagcccaacccaggcccaacccggcccaacccagcccagcccagctcagctcagctactccaagggcaggaccaatggctgagcctcgtgtccagactcagagggctggattttggttcccttgtaaagacagagtgaatttcagtataaagatcacccgttgtattcaccccacacccagggctagtataaacatgaccctgggcttctgtaccacactagaattcatgtgagaaagctaaaatggtggtcttctccaccagcccctcacaggcttgggggttttctatgtgaaacacatgccagtttttaaaatgctgctttgtccaggtgagaacatccataatttggggccctgagttttacccagactcaaggagttggtaaagggttaatagccagatagtagaaccagtgaggagatgcggccaaagattctttatatctgaaccaagatgtaaaacaagaaatgctttgaggctttctaagcgatcctcctgtctaatttgcacctttgtctggatgcactcttctgaccttgctgccacaacctgtggggtctgatgtgtcccaagatgggtgctgccctcagggactgcaccctgacaagtgttaaggcaacattccttgcttgtgccctgggccaaaaccaatgctgatgaccttatcagcttcctgtttcttcccatactgcatacaccactgcaaaatgtcttaatgcaaattttgtatttcttacaggcctacagaaattgaaaatgaccaaaatcaggaaccacagatttgtgcccattcctaatattttgttctgcaaattaatgtataatttgaggtgaaattcagttataaagtcaaggacgaatttgcacagtgatatatttctatgtgtatgcaagtacaagtatataatatgtcacctggcacattcattttctcagttgaagaagagaaaatttgaaaatgtccttatgcttttagagttgcaacttaagtatatttggtagggtgagtgtttccactcaaaatatgtcaacttaaaaaaaaataggccctttcataaaaaccaaactgtagcaagatgcaaatgcatggcaaatctgtcggtctccagttggttatctgaatagtgtcaccaattccaccaagacagtgctgagattggaaagggcactcatttggattgccttacttctcttgccttaaatatatcccatatatttaatatgtcaaaaagggcttgaggtgaatttcattaaatggaataatatgatgccactttgcagctaaaataagctcagtgatacctccttgtt

SEQ ID NO: 314 - DNA, 468 bp, Homo sapiens
  3' terminal sequence. peroxiredoxin 2 (PRDX2) gene.
  modified_base (2): a, t, c or g
  modified_base (3): a, t, c or g
  modified_base (14): a, t, c or g
  modified_base (33): a, t, c or g
  modified_base (36): a, t, c or g
  modified_base (40): a, t, c or g
  modified_base (210): a, t, c or g
  modified_base (257): a, t, c or g
  modified_base (263): a, t, c or g
  modified_base (281): a, t, c or g
  modified_base (359): a, t, c or g
  modified_base (412): a, t, c or g
  modified_base (424): a, t, c or g
  modified_base (435): a, t, c or g
  modified_base (460): a, t, c or g
tnnttttttttttncacctttccctaatacttnatnggtnacctctaggcctgtgtgcggctgggtgggcttgggggagggcgtcactattcagcttctaggtggaggcatgagaaggccttggctaggccctccagggtcccatactgtggagtttggaggggcaggtctggcctttcctgggtcagcatagggcacccaggtgggggnacaggtggacacccagcacaggcacctaggcaggggcacaagctcantatccnttagccagcctaattgtntttggagaaatattccttgctgtcatccacgttgggtttaatcgtgtcactgccaggtttccagccagcgggacaaantttccccatgttcgtttgtgtattgggaaggcctgggaccagccgcagagttnatcccacggagngtcccaaaggnaaatcattaaacagtgattttggcnaaggaaaa

SEQ ID NO: 315 - DNA, 394 bp, Homo sapiens
  5' terminal sequence. peroxiredoxin 2 (PRDX2) gene.
acttcaaggccacagcggtggttgatggcgccttcaaagaggtgaagctgtcggactacaaagggaagtacgtggtcctctttttctaccctctggacttcacttttgtgtgccccaccgagatcatcgcgttcagcaaccgtgcagaggacttccgcaagctgggctgtgaagtgctgggcgtctcgggtggactctcagttcacccacctggcttggatcaacaccccccggaaagagggaggcttgggccccctgaacatccccctgcttgctgacgtgaccagacgcttgtctgaggattacggcgtgctgaaaacagatgagggcattgctaacaggggcctctttatcatcgatgggcaagggtgttcctttcgccagatcaatgtta

SEQ ID NO: 316 - DNA, 937 bp, Homo sapiens
  peroxiredoxin 2 (PRDX2) gene.
cgcggccccagggctcacttggcgctgagaacgcgggtgcagcgtgtgatcgtccgtgcgtctagcctttgcccacgcagctttcagtcatggcctccggtaacgcgcgcatcggaaagccagcccctgacttcaaggccacagcggtggttgatggcgccttcaaagaggtgaagctgtcggactacaaagggaagtacgtggtcctctttttctaccctctggacttcacttttgtgtgccccaccgagatcatcgcgttcacaaccgtgaagaggacttccgcaaagctgggctgtgaagtgctgggcgtctcggtggactctcagttcacccacctggcttggatcaacaccccccggaaagagggaggcttgggccccttgaacatccccctgcttgctgacgtgaccagacgcttgtctgaggattacggcgtgctgaaaaacgatgagggcattgcttacaggggcctctttatcatcgatggcaagggtgtccttcgccagatcactgttaatgatttgcctgtgggacgctccgtggatgaggctctgcggctggtccaggccttccagtacacagacgagcatggggaagtttgtccggctgcttggaagcctggacgtgacacgattaagccgaacgtggatgacagcaaggaatatttctccaaacacaattaggctggctaacggatagtgagcttgtgcccctgcctaggtgcctgtgctgggtgtccacctgtgcccccacctgggtgccctatgctgacccaggaaaggccagacctgcccctccaaaatccacagtatgggaccctggagggctagcaaggccttctcatgcctccacctagaagctgaatagtgacgccctcccccaagcccacccagccgcacacaggcctagaggtaaccaataaagtattagggcc

SEQ ID NO: 317 - DNA, 451 bp, Homo sapiens
  5' terminal sequence. v-fos fbj murine osteosarcoma viral oncogene homolog (FOS) gene.
  modified_base (180): a, t, c or g
  modified_base (274): a, t, c or g
  modified_base (345): a, t, c or g
  modified_base (391): a, t, c or g
  modified_base (399): a, t, c or g
  modified_base (422): a, t, c or g
  modified_base (432): a, t, c or g
gctagcaccatgagctgaagaccgagccctttgatgacttcctgttcccagcatcatccaggcccagtggctctgagacagcccgctccgtgccagacatggacctatctgggtccttctatgcagcagactgggagcctctgcacagtggctccctggggatggggcccatggcacagnagctggagcccctgtgcactccggtggtcacctgtactcccagctgcactgcttacacgtcttccttcgtcttcacctaccccgaggctgactncttccccagctgtgcagctgcccaccgcaaggcagcagcagcaatgagccttcctctgactcgttcagctnacccacggtgctggccctgtgagggggcaggggaaggggaggcagncggcaacnacaagttgccattgtccgagttngttgatttanagagaggagaaacaaattt

SEQ ID NO: 318 - DNA, 2084 bp, Homo sapiens
  v-fos fbj murine osteosarcoma viral oncogene homolog (FOS) gene.
aaccgcatctgcagcgagcaactgagaagccaagactgagccggcggccgcggcgcagcgaacgagcagtgaccgtgctcctacccagctctgcttcacagcgcccacctgtctccgcccctcggcccctcgcccggctttgcctaaccgccacgatgatgttctcgggcttcaacgcagactacgaggcgtcatcctcccgctgcagcagcgcgtccccggccggggatagcctctcttactaccactcacccgcagactccttctccagcatgggctcgcctgtcaacgcgcaggacttctgcacggacctggccgtctccagtgccaacttcattcccacggtcactgccatctcgaccagtccggacctgcagtggctggtgcagcccgccctcgtctcctctgtggccccatcgcagaccagagcccctcaccctttcggagtccccgccccctccgctggggcttactccagggctggcgttgtgaagaccatgacaggaggccgagcgcagagcattggcaggaggggcaaggtggaacagttatctccagaagaagaagagaaaaggagaatccgaagggaaaggaataagatggctgcagccaaatgccgcaaccggaggagggagctgactgatacactccaagcggagacagaccaactagaagatgagaagtctgctttgcagaccgagattgccaacctgctgaaggagaaggaaaaactagagttcatcctggcagctcaccgacctgcctgcaagatccctgatgacctgggcttcccagaagagatgtctgtggcttcccttgatctgactgggggcctgccagaggttgccaccccggagtctgaggaggccttcaccctgcctctcctcaatgaccctgagcccaagccctcagtggaacctgtcaagagcatcagcagcatggagctgaagaccgagccctttgatgacttcctgttcccagcatcatccaggcccagtggctctgagacagcccgctccgtgccagacatggacctatctgggtccttctatgcagcagactgggagcctctgcacagtggctccctggggatggggcccatggccacagagctggagcccctgtgcactccggtggtcacctgtactcccagctgcactgcttacacgtcttccttcgtcttcacctaccccgaggctgactccttccccagctgtgcagctgcccaccgcaagggcagcagcagcaatgagccttcctctgactcgctcagctcacccacgctgctggccctgtgagggggcagggaaggggaggcagccggcacccacaagtgccactgcccgagctggtgcattacagagaggagaaacacatcttccctagagggttcctgtagacctagggaggaccttatctgtgcgtgaaacacaccaggctgtgggcctcaaggacttgaaagcatccatgtgtggactcaagtccttacctcttccggagatgtagcaaaacgcatggagtgtgtattgttcccagtgacacttcagagagctggtagttagtagcatgttgagccaggcctgggtctgtgtctcttttctctttctccttagtcttctcatagcattaactaatctattgggttcattattggaattaacctggtgctggatattttcaaattgtatctagtgcagctgattttaacaataactactgtgttcctggcaatagtgtgttctgattagaaatgaccaatattatactaagaaaagatacgactttattttctggtagatagaaataaatagctatatccatgtactgtagtttttcttcaacatcaatgttcattgtaatgttactgatcatgcattgttgaggtggtctgaatgttctgacattaacagttttccatgaaaacgttttattgtgtttttaatttatttattaagatggattctcagatatttatatttttattttatttttttctaccttgaggtcttttgacatgtggaaagtgaatttgaatgaaaaatttaagcattgtttgcttattgttccaagacattgtcaataaa

SEQ ID NO: 319 - DNA, 240 bp, Homo sapiens
  3' terminal sequence. retinoblastoma-binding protein 7 (RBBP7) gene.
  modified_base (110): a, t, c or g
  modified_base (166): a, t, c or g
  modified_base (199): a, t, c or g
  modified_base (237): a, t, c or g
ctgcaaagccaatcaagaagtgttggaaggaaaaagtgtaaaagttattcttgcatatttgggaacagcaagcacttagtttgagaaaatgaggacttaaaacagttgantcaaaggcaataccctgctacttgtatttaaaatcaatggtgatgttatttcttangcaacattcttctcttccctaatagctacaatntgatacagtacgcaacagctcacttgaaagtgctagantca

SEQ ID NO: 320 - DNA, 457 bp, Homo sapiens
  5' terminal sequence. retinoblastoma-binding protein 7 (RBBP7) gene.
  modified_base (323): a, t, c or g
  modified_base (395): a, t, c or g
  modified_base (420): a, t, c or g
  modified_base (446): a, t, c or g
agatgtttgaagatactgtggaggagcgtgtcatcaatgaagaatataaaatctggaagaagaatacaccgtttctatatgacctggttatgacccatgctcttcagtggcccagtcttaccgttcagtggcttcctgaagtgactaaacctgaaggaaaagattatgcccttcattggctagtgctggggactcatacgtctgatgagcagaatcatctggtggttgctcgagtacatattcccaatgatgatgcacagtttgatgcttcccattgtgacagtgacaagggtgaatttggtggctttggttctgtaacaggnaaaattgaatgtgaaattaaaatcaattcacgaaggagaagttaaaccgtgctcgttaacatggccgcagantccttcacatccattgcttacaaanacaccctcttgcttgatggtgttggntttttgactat

SEQ ID NO: 321 - DNA, 1946 bp, Homo sapiens
  retinoblastoma-binding protein 7 (RBBP7) gene.
gcctcgtcagctgcctgggcgggctgggaggcgcgggttgaaaagtctcgttccaagtttggagagagagagaagagcgcctcagacctcggtacccgcgagcggggaggaggcaggaaagaaggacgcggcgtctggggagcacccaggcagcaagacggggcccgggctttcgacagtggggagtgtgacgcgcttgggaaaggcaggagcgccagcggtcgggctgctcttggctaacgagaggagtccgaggcggcggcgaggggcgaacgacccgacgcaagatggcgagtaaagagatgtttgaagatactgtggaggagcgtgtcatcaatgaagaatataaaatctggaagaagaatacaccgtttctatatgacctggttatgacccatgctcttcagtggcccagtcttaccgttcagtggcttcctgaagtgactaaacctgaaggaaaagattatgcccttcattggctagtgctggggactcatacgtctgatgagcagaatcatctggtggttgctcgagtacatattcccaatgatgatgcacagtttgatgcttcccattgtgacagtgacaagggtgaatttggtggctttggttctgtaacaggaaaaattgaatgtgaaattaaaatcaatcacgaaggagaagtaaaccgtgctcgttacatgccgcagaatcctcacatcattgctacaaaaacaccatcttctgatgtgttggtttttgactatacaaaacaccctgctaaaccagacccaagtggagaatgtaatcctgatctcagattaagaggtcaccagaaggaaggctatggtctctcctggaattcaaatttgagtggacatctcctaagtgcatctgatgaccatactgtttgtctgtgggatataaacgcaggaccaaaagaaggcaaaattgtggatgctaaagccatctttactggccactcagctgttgtagaggatgtggcctggcacctgctgcacgagtcattgtttggatctgttgctgatgatcagaaacttatgatatgggacaccaggtccaataccacctccaagccgagtcacttggtggatgcgcacactgccgaagtcaactgcctctcattcaatccctacagcgaatttattctagccaccggctctgcggataagaccgtagctttatgggatctgcgtaacttaaaattaaaactccataccttcgaatctcataaagatgaaattttccaggtccactggtctccacataatgaaactattctggcttcaagtggtactgaccgccgcctgaatgtgtgggatttaagtaaaattggggaagaacaatcagcagaagatgcagaagatgggcctccagaactcctgtttattcatggaggacacactgctaagatttcagattttagctggaaccccaatgagccttgggtcatttgctcagtgtctgaggataacatcatgcagatatggcaaatggctgaaaatatttacaatgatgaagagtcagatgtcacgacatccgaactggagggacaaggatcttaaacccaaagtacgagaaatgtttctgttgaatgtaatgctacatgaatgcttgatttatcaagcgccaaaaaggcattgtatagtaggaaatgtaagtggggtggcttatggcttctttatcctctgattctagcactttcaagtgagctgttgcgtactgtatcatattgtagctattagggaagagaagaatgttgcttaagaaagaacatcaccattgattttaaatacaagtagcagggtattgcctttgattcaactgttttaagtcctcattttctcaaactaagtgcttgctgttcccaaatatgcaagaataacttttacactttttccttccaacacttcttgattggctttgcagaaataaagttttaaaat

SEQ ID NO: 322 - DNA, 365 bp, Homo sapiens
  3' terminal sequence. kiaa1075 protein (KIAA1075) gene.
tatagaaattctttattattagacaaaaatagactctcttttttcccctattcatgtgatcctactctgaatctctgctcagaggaggcagtgactcgctccccacccctctcccatccctgccgtgctggcacctgcagctgggtggaactggcaggggctgatcccctgggagggctgacgttctcctgcaggtggggctgcctgatctccttcggggctcaactgctgatgcctcctcacccctcacacacccatctctgccatctgctcacatggcaagggtcatcttgtggggcctggtccactttaacttaggcagggctggggggcgggggaagggagaggcagtgttcccaggggcc

SEQ ID NO: 323 - DNA, 400 bp, Homo sapiens
  5' terminal sequence. kiaa1075 protein (KIAA1075) gene.
  modified_base (162): a, t, c or g
  modified_base (196): a, t, c or g
  modified_base (333): a, t, c or g
  modified_base (365): a, t, c or g
tcaagggctgccccagtgagccctactttggcagcctgtccgccttggtctcccagcactccatctcccccatctccctgccctgctgcctgcgcattcccagcaaagatcctctggaagagaccccagaggctccagtgcccaccaacatgagcacagcgncagacctcctgcgtcagggtgctgcctgcaggtngctctacttgacctcagtggagacagagtcactgacgggcccccaagctgtggcccgggccagctctgcagctctgagctgtagcccccgcccgacaccagctgttgtccacttcaaggtgtcagcccagggcattnacactgacgggacaaccaaaggaagctctttnttttcgccgccattatccagtggaacagcatcacc

SEQ ID NO: 324 - DNA, 489 bp, Homo sapiens
  5' terminal sequence. atp-binding cassette, sub-family c (cftr/mrp), member 5 (ABCC5) gene.
  modified_base (1): a, t, c or g
  modified_base (12): a, t, c or g
  modified_base (103): a, t, c or g
  modified_base (215): a, t, c or g
  modified_base (222): a, t, c or g
  modified_base (358): a, t, c or g
  modified_base (368): a, t, c or g
  modified_base (412): a, t, c or g
  modified_base (443): a, t, c or g
  modified_base (466): a, t, c or g
nttcggcacagnaagatacaactctgtgctgaacagctgctgcctgaggctgacctggccattcttcccagcagcgacctgacggagattggagagcgagtancaacctgagcggtgggcagcgcagaggatcagccttgcccgggccttgtatagtgacaggagcatctacatcctggacgaccccctcagtgccttagatgcccatgtggaanccacatncttcaatagtgctatccggaaacatctcaagtccaagacagttctgtttgttacccaccagttacagtacctgggttgactgtgatgaagtgatcttcatgaaagagggctgtatttacgggaaagagggcacccntggagggaantgatggattttaaatggtgattatggttacctttttaattaacntgttgttgggggagagacaccgccattgagntcatttcaaaaaggggaaccgtnggttcacagaggagttcacagtt

SEQ ID NO: 325 - DNA, 5838 bp, Homo sapiens
  atp-binding cassette, sub-family c (cftr/mrp), member 5 (ABCC5) gene.
ccgggcaggtggctcatgctcgggagcgtggttgagcggctggcgcggttgtcctggagcaggggcgcaggaattctgatgtgaaactaacagtctgtgagccctggaacctccgctcagagaagatgaaggatatcgacataggaaaagagtatatcatccccagtcctgggtatagaagtgtgagggagagaaccagcacttctgggacgcacagagaccgtgaagattccaagttcaggagaactcgaccgttggaatgccaagatgccttggaaacagcagcccgagccgagggcctctctcttgatgcctccatgcattctcagctcagaatcctggatgaggagcatcccaagggaaagtaccatcatggcttgagtgctctgaagcccatccggactacttccaaacaccagcacccagtggacaatgctgggcttttttcctgtatgactttttcgtggctttcttctctggcccgtgtggcccacaagaagggggagctctcaatggaagacgtgtggtctctgtccaagcacgagtcttctgacgtgaactgcagaagactagagagactgtggcaagaagagctgaatgaagttgggccagacgctgcttccctgcgaagggttgtgtggatcttctgccgcaccaggctcatcctgtccatcgtgtgcctgatgatcacgcagctggctggcttcagtggaccagccttcatggtgaaacacctcttggagtatacccaggcaacagagtctaacctgcagtacagcttgttgttagtgctgggcctcctcctgacggaaatcgtgcggtcttggtcgcttgcactgacttgggcattgaattaccgaaccggtgtccgcttgcggggggccatcctaaccatggcatttaagaagatccttaagttaaagaacattaaagagaaatccctgggtgagctcatcaacatttgctccaacgatgggcagagaatgtttgaggcagcagccgttggcagcctgctggctggaggacccgttgttgccatcttaggcatgatttataatgtaattattctgggaccaacaggcttcctgggatcagctgtttttatcctcttttacccagcaatgatgtttgcatcacggctcacagcatatttcaggagaaaatgcgtggccgccacggatgaacgtgtccagaagatgaatgaagttcttacttacattaaatttatcaaaatgtatgcctgggtcaaagcattttctcagagtgttcaaaaaatccgcgaggaggagcgtcggatattggaaaaagccgggtacttccagggtatcactgtgggtgtggctcccattgtggtggtgattgccagcgtggtgaccttctctgttcatatgaccctgggcttcgatctgacagcagcacaggctttcacagtggtgacagtcttcaattccatgacttttgctttgaaagtaacaccgttttcagtaaagtccctctcagaagcctcagtggctgttgacagatttaagagtttgtttctaatggaagaggttcacatgataaagaacaaaccagccagtcctcacatcaagatagagatgaaaaatgccaccttggcatgggactcctcccactccagtatccagaactcgcccaagctgacccccaaaatgaaaaaagacaagagggcttccaggggcaagaaagagaaggtgaggcagctgcagcgcactgagcatcaggcggtgctggcagagcagaaaggccacctcctcctggacagtgacgagcggcccagtcccgaagaggaagaaggcaagcacatccacctgggccacctgcgcttacagaggacactgcacagcatcgatctggagatccaagagggtaaactggttggaatctgcggcagtgtgggaagtggaaaaacctctctcatttcagccattttaggccagatgacgcttctagagggcagcattgcaatcagtggaaccttcgcttatgtggcccagcaggcctggatcctcaatgctactctgagagacaacatcctgtttgggaaggaatatgatgaagaaagatacaactctgtgctgaacagctgctgcctgaggcctgacctggccattcttcccagcagcgacctgacggagattggagagcgaggagccaacctgagcggtgggcagcgccagaggatcagccttgcccgggccttgtatagtgacaggagcatctacatcctggacgaccccctcagtgccttagatgcccatgtgggcaaccacatcttcaatagtgctatccggaaacatctcaagtccaagacagttctgtttgttacccaccagttacagtacctggttgactgtgatgaagtgatcttcatgaaagagggctgtattacggaaagaggcacccatgaggaactgatgaatttaaatggtgactatgctaccatttttaataacctgttgctgggagagacaccgccagttgagatcaattcaaaaaaggaaaccagtggttcacagaagaagtcacaagacaagggtcctaaaacaggatcagtaaagaaggaaaaagcagtaaagccagaggaagggcagcttgtgcagctggaagagaaagggcagggttcagtgccctggtcagtatatggtgtctacatccaggctgctgggggccccttggcattcctggttattatggcccttttcatgctgaatgtaggcagcaccgccttcagcacctggtggttgagttactggatcaagcaaggaagcgggaacaccactgtgactcgagggaacgagacctcggtgagtgacagcatgaaggacaatcctcatatgcagtactatgccagcatctacgccctctccatggcagtcatgctgatcctgaaagccattcgaggagttgtctttgtcaagggcacgctgcgagcttcctcccggctgcatgacgagcttttccgaaggatccttcgaagccctatgaagttttttgacacgacccccacagggaggattctcaacaggttttccaaagacatggatgaagttgacgtgcggctgccgttccaggccgagatgttcatccagaacgttatcctggtgttcttctgtgtgggaatgatcgcaggagtcttcccgtggttccttgtggcagtggggccccttgtcatcctcttttcagtcctgcacattgtctccagggtcctgattcgggagctgaagcgtctggacaatatcacgcagtcacctttcctctcccacatcacgtccagcatacagggccttgccaccatccacgcctacaataaagggcaggagtttctgcacagataccaggagctgctggatgacaaccaagctcctttttttttgtttacgtgtgcgatgcggtggctggctgtgcggctggacctcatcagcatcgccctcatcaccaccacggggctgatgatcgttcttatgcacgggcagattcccccagcctatgcgggtctcgccatctcttatgctgtccagttaacggggctgttccagtttacggtcagactggcatctgagacagaagctcgattcacctcggtggagaggatcaatcactacattaagactctgtccttggaagcacctgccagaattaagaacaaggctccctcccctgactggccccaggagggagaggtgacctttgagaacgcagagatgaggtaccgagaaaacctccctcttgtcctaaagaaagtatccttcacgatcaaacctaaagagaagattggcattgtggggcggacaggatcagggaagtcctcgctggggatggccctcttccgtctggtggagttatctggaggctgcatcaagattgatggagtgagaatcagtgatattggccttgccgacctccgaagcaaactctctatcattcctcaagagccggtgctgttcagtggcactgtcagatcaaatttggaccccttcaaccagtacactgaagaccagatttgggatgccctggagaggacacacatgaaagaatgtattgctcagctacctctgaaacttgaatctgaagtgatggagaatggggataacttctcagtgggggaacggcagctcttgtgcatagctagagccctgctccgccactgtaagattctgattttagatgaagccacagctgccatggacacagagacagacttattgattcaagagaccatccgagaagcatttgcagactgtaccatgctgaccattgcccatcgcctgcacacggttctaggctccgataggattatggtgctggcccagggacaggtggtggagtttgacaccccatcggtccttctgtccaacgacagttcccgattctatgccatgtttgctgctgcagagaacaaggtcgctgtcaagggctgactcctccctgttgacgaagtctcttttctttagagcattgccattccctgcctggggcgggcccctcatcgcgtcctcctaccgaaaccttgcctttctcgattttatctttcgcacagcagttccggattggcttgtgtgtttcacttttagggagagtcatattttgattattgtatttattccatattcatgtaaacaaaatttagtttttgttcttaattgcactctaaaaggttcagggaaccgttattataattgtatcagaggcctataatgaagctttatacgtgtagctatatctatatataattctgtacatagcctatatttacagtgaaaatgtaagctgtttattttatattaaaataagcactgtgctaataacagtgcatattcctttctatcatttttgtacagtttgctgtactagagatctggttttgctattagactgtaggaagagtagcatttcattcttctctagctggtggtttcacggtgccaggttttctgggtgtccaaaggaagacgtgtggcaatagtgggccctccgacagccccctctgccgcctccccacagccgctccaggggtggctggagacgggtgggcggctggagaccatgcagagcgccgtgagttctcagggctcctgccttctgtcctggtgtcacttactgtttctgtcaggagagcagcggggcgaagcccaggccccttttcactccctccatcaagaatggggatcacagagacattcctccgagccggggagtttctttcctgccttcttctttttgctgttgtttctaaacaagaatcagtctatccacagagagtcccactgcctcaggttcctatggctggccactgcacagagctctccagctccaagacctgttggttccaagccctggagccaactgctgctttttgaggtggcactttttcatttgcctattcccacacctccacagttcagtggcagggctcaggatttcgtgggtctgttttcctttctcaccgcagtcgtcgcacagtctctctctctctctcccctcaaagtctgcaactttaagcagctcttgctaatcagtgtctcacactggcgtagaagtttttgtactgtaaagagacctacctcaggttgctggttgctgtgtggtttggtgtgttcccgcaaaccccctttgtgctgtggggctggtagctcaggtgggcgtggtcactgctgtcatcagttgaatggtcagcgttgcatgtcgtgaccaactagacattctgtcgccttagcatgtttgctgaacaccttgtggaagcaaaaatctgaaaatgtgaataaaattattttggattttgtaaaaaaaaaaaaaaaaaaaaaaaaaaaaaaaaaaaaa

SEQ ID NO: 326 - DNA, 385 bp, Homo sapiens
  3' terminal sequence. cadherin 1, type 1, e-cadherin (epithelial) (CDH1) gene.
  modified_base (3): a, t, c or g
  modified_base (6): a, t, c or g
  modified_base (62): a, t, c or g
  modified_base (165): a, t, c or g
  modified_base (166): a, t, c or g
  modified_base (202): a, t, c or g
  modified_base (257): a, t, c or g
  modified_base (287): a, t, c or g
  modified_base (319): a, t, c or g
  modified_base (321): a, t, c or g
  modified_base (324): a, t, c or g
  modified_base (325): a, t, c or g
  modified_base (331): a, t, c or g
  modified_base (335): a, t, c or g
  modified_base (341): a, t, c or g
  modified_base (343): a, t, c or g
  modified_base (367): a, t, c or g
aanganatattaacaaaattgtttaataaaatttataaaaatgcatctttgagaatactttnctcagcttgaattgttttccttttccacccccaaagaaaatacacaattatcagcacccacacatgtatacactcaaaactacagtgacattctctacacagnnctatattcgatatagcttgaactgccgaaaaatcangacaattccaaaaggtgattgcagggttgatttttttctccaaaacacttgaganacagtaaagctatttcaacaaaggtctttnctttgattgtcaaaggttgaaattcacatttnantannaggggntccnaatcangntcctcactaccccctacccctcanctaaccccctttggggcc

SEQ ID NO: 327 - DNA, 423 bp, Homo sapiens
  5' terminal sequence. cadherin 1, type 1, e-cadherin (epithelial) (CDH1) gene.
  modified_base (14): a, t, c or g
  modified_base (346): a, t, c or g
  modified_base (398): a, t, c or g
ggcacgagcaaganaggagttctctgatgcagaaattattgggctcttttagggtaagaagtttgtgtctttgtctggccacatcttgactaggtattgtctactctgaagacctttaatggcttccctctttcatctcctgagtatgtaacttgcaatgggcagctatccagtgacttgttctgagtaagtgtgttcattaatgtttatttagctctgaagcaagagtgatatactccagggacttagaatagtgcctaaagtgctgcagccaaagacagagcggaactatgaaaagtgggcttggagatggcaggagagcttgtcattgagcctgggcaatttnagcaaactgatgtctgaggatgattcgaggtgggtcttacctcatctactgnaaaattctggtaaggaatgggaggg

SEQ ID NO: 328 - DNA, 4828 bp, Homo sapiens
  cadherin 1, type 1, e-cadherin (epithelial) (CDH1) gene.
agtggcgtcggaactgcaaagcacctgtgagcttgcggaagtcagttcagactccagcccgctccagcccggcccgacccgaccgcacccggcgcctgccctcgctcggcgtccccggccagccatgggcccttggagccgcagcctctcggcgctgctgctgctgctgcaggtctcctcttggctctgccaggagccggagccctgccaccctggctttgacgccgagagctacacgttcacggtgccccggcgccacctggagagaggccgcgtcctgggcagagtgaattttgaagattgcaccggtcgacaaaggacagcctatttttccctcgacacccgattcaaagtgggcacagatggtgtgattacagtcaaaaggcctctacggtttcataacccacagatccatttcttggtctacgcctgggactccacctacagaaagttttccaccaaagtcacgctgaatacagtggggcaccaccaccgccccccgccccatcaggcctccgtttctggaatccaagcagaattgctcacatttcccaactcctctcctggcctcagaagacagaagagagactgggttattcctcccatcagctgcccagaaaatgaaaaaggcccatttcctaaaaacctggttcagatcaaatccaacaaagacaaagaaggcaaggttttctacagcatcactggccaaggagctgacacaccccctgttggtgtctttattattgaaagagaaacaggatggctgaaggtgacagagcctctggatagagaacgcattgccacatacactctcttctctcacgctgtgtcatccaacgggaatgcagttgaggatccaatggagattttgatcacggtaaccgatcagaatgacaacaagcccgaattcacccaggaggtctttaaggggtctgtcatggaaggtgctcttccaggaacctctgtgatggaggtcacagccacagacgcggacgatgatgtgaacacctacaatgccgccatcgcttacaccatcctcagccaagatcctgagctccctgacaaaaatatgttcaccattaacaggaacacaggagtcatcagtgtggtcaccactgggctggaccgagagagtttccctacgtataccctggtggttcaagctgctgaccttcaaggtgaggggttaagcacaacagcaacagctgtgatcacagtcactgacaccaacgataatcctccgatcttcaatcccaccacgtacaagggtcaggtgcctgagaacgaggctaacgtcgtaatcaccacactgaaagtgactgatgctgatgcccccaataccccagcgtgggaggctgtatacaccatattgaatgatgatggtggacaatttgtcgtcaccacaaatccagtgaacaacgatggcattttgaaaacagcaaagggcttggattttgaggccaagcagcagtacattctacacgtagcagtgacgaatgtggtaccttttgaggtctctctcaccacctccacagccaccgtcaccgtggatgtgctggatgtgaatgaagcccccatctttgtgcctcctgaaaagagagtggaagtgtccgaggactttggcgtgggccaggaaatcacatcctacactgcccaggagccagacacatttatggaacagaaaataacatatcggatttggagagacactgccaactggctggagattaatccggacactggtgccatttccactcgggctgagctggacagggaggattttgagcacgtgaagaacagcacgtacacagccctaatcatagctacagacaatggttctccagttgctactggaacagggacacttctgctgatcctgtctgatgtgaatgacaacgcccccataccagaacctcgaactatattcttctgtgagaggaatccaaagcctcaggtcataaacatcattgatgcagaccttcctcccaatacatctcccttcacagcagaactaacacacggggcgagtgccaactggaccattcagtacaacgacccaacccaagaatctatcattttgaagccaaagatggccttagaggtgggtgactacaaaatcaatctcaagctcatggataaccagaataaagaccaagtgaccaccttagaggtcagcgtgtgtgactgtgaaggggccgccggcgtctgtaggaaggcacagcctgtcgaagcaggattgcaaattcctgccattctggggattcttggaggaattcttgctttgctaattctgattctgctgctcttgctgtttcttcggaggagagcggtggtcaaagagcccttactgcccccagaggatgacacccgggacaacgtttattactatgatgaagaaggaggcggagaagaggaccaggactttgacttgagccagctgcacaggggcctggacgctcggcctgaagtgactcgtaacgacgttgcaccaaccctcatgagtgtcccccggtatcttccccgccctgccaatcccgatgaaattggaaattttattgatgaaaatctgaaagcggctgatactgaccccacagccccgccttatgattctctgctcgtgtttgactatgaaggaagcggttccgaagctgctagtctgagctccctgaactcctcagagtcagacaaagaccaggactatgactacttgaacgaatggggcaatcgcttcaagaagctggctgacatgtacggaggcggcgaggacgactaggggactcgagagaggcgggccccagacccatgtgctgggaaatgcagaaatcacgttgctggtggtttttcagctcccttcccttgagatgagtttctggggaaaaaaaagagactggttagtgatgcagttagtatagctttatactctctccactttatagctctaataagtttgtgttagaaaagtttcgacttatttcttaaagcttttttttttttcccatcactctttacatggtggtgatgtccaaaagatacccaaattttaatattccagaagaacaactttagcatcagaaggttcacccagcaccttgcagattttcttaaggaattttgtctcacttttaaaaagaaggggagaagtcagctactctagttctgttgttttgtgtatataattttttaaaaaaaatttgtgtgcttctgctcattactacactggtgtgtccctctgcctttttttttttttttaagacagggtctcattctatcggccaggctggagtgcagtggtgcaatcacagctcactgcagccttgtcctcccaggctcaagctatccttgcacctcagcctcccaagtagctgggaccacaggcatgcaccactacgcatgactaattttttaaatatttgagacggggtctccctgtgttacccaggctggtctcaaactcctgggctcaagtgatcctcccatcttggcctcccagagtattgggattacagacatgagccactgcacctgcccagctccccaactccctgccattttttaagagacagtttcgctccatcgcccaggcctgggatgcagtgatgtgatcatagctcactgtaacctcaaactctggggctcaagcagttctcccaccagcctcctttttatttttttgtacagatggggtcttgctatgttgcccaagctggtcttaaactcctggcctcaagcaatccttctgccttggccccccaaagtgctgggattgtgggcatgagctgctgtgcccagcctccatgttttaatatcaactctcactcctgaattcagttgctttgcccaagataggagttctctgatgcagaaattattgggctcttttagggtaagaagtttgtgtctttgtctggccacatcttgactaggtattgtctactctgaagacctttaatggcttccctctttcatctcctgagtatgtaacttgcaatgggcagctatccagtgacttgttctgagtaagtgtgttcattaatgtttatttagctctgaagcaagagtgatatactccaggacttagaatagtgcctaaagtgctgcagccaaagacagagcggaactatgaaaagtgggcttggagatggcaggagagcttgtcattgagcctggcaatttagcaaactgatgctgaggatgattgaggtgggtctacctcatctctgaaaattctggaaggaatggaggagtctcaacatgtgtttctgacacaagatccgtggtttgtactcaaagcccagaatccccaagtgcctgcttttgatgatgtctacagaaaatgctggctgagctgaacacatttgcccaattccaggtgtgcacagaaaaccgagaatattcaaaattccaaattttttcttaggagcaagaagaaaatgtggccctaaagggggttagttgaggggtagggggtagtgaggatcttgatttggatctctttttatttaaatgtgaatttcaacttttgacaatcaaagaaaagacttttgttgaaatagctttactgtttctcaagtgttttggagaaaaaaatcaaccctgcaatcactttttggaattgtcttgatttttcggcagttcaagctatatcgaatatagttctgtgtagagaatgtcactgtagttttgagtgtatacatgtgtgggtgctgataattgtgtattttctttgggggtggaaaaggaaaacaattcaagctgagaaaagtattctcaaagatgcatttttataaattttattaaacaattttgttaaaccataaaaaaaaaaaaa

SEQ ID NO: 329 - DNA, 471 bp, Homo sapiens
  5' terminal sequence. zinc finger protein 144 (mel-18) (ZNF144) gene.
  modified_base (413): a, t, c or g
  modified_base (431): a, t, c or g
  modified_base (446): a, t, c or g
attcggcacatgattccacttccgtttcccagggcaacgctccccagtccccccacccccgaccccggaatcatgcatcggactacacggatcaaaatcacagagctgaacccccacctcatgtgtgccctctgcggggggtacttcatcgacgccaccactatcgtggagtgcctgcattccttctgcaaaacctgcatcgtgcgctacctggagaccaacaaatactgccccatgtgtgacgtgcaggtccataaaacccggccgctgctgagcattcaggtctgacaaaacatttcaagacattgtcttacaaattggtccctggggctttttaaagatggagattgaaacgggcggcgggatttcttatggcaggcgttaccccttggacgggaggttcccccaacggnttccaattgagggaccgngggcgagggtttttngggaggcagggagaaggggggtttt

SEQ ID NO: 330 - DNA, 2227 bp, Homo sapiens
  zinc finger protein 144 (mel-18) (ZNF144) gene.
gagagcccgaacaggaagagggtacagctttgtgcaggtcacatgcccactgcagccctccagcctctggtccccagagcggactttggaagctgaactgcttttgttgctggaagacttatgttataatttaccctgggtggaccagggtcgtacaaaagggcaacgctccccagtccccccactcccgaccccggaatcatgcatcggactacacggatcaaaatcacagagctgaacccccacctcatgtgtgccctctgcggggggtacttcatcgacgccaccactatcgtggagtgcctgcattccttctgcaaaacctgcatcgtgcgctacctggagaccaacaaatactgccccatgtgtgacgtgcaggtccataaaacccggccgctgctgagcatcaggtctgacaaaacacttcaagacattgtctacaaattggtccctgggctttttaaagatgagatgaaacggcggcgggatttctatgcagcgtaccccctgacggaggtccccaacggctccaatgaggaccgcggcgaggtcttggagcaggagaagggggctctgagtgatgatgagattgtcagcctctccatcgaattctacgaaggtgccagggaccgggatgagaagaagggccccctggagaatggggatggggacaaagagaaaacaggggtgcgcttcctgcgatgcccagcagccatgaccgtcatgcatcttgccaagtttctccgcaacaagatggatgtgcccagcaagtacaaggtggaggttctgtacgaggacgagccactgaaggaatactacaccctcatggacatcgcctacatctacccctggcggcggaacgggcctctccccctcaagtaccgtgtccagccagcctgcaagcggctcaccctagccacggtgcccaccccctccgagggcaccaacaccagcggggcgtccgagtgtgagtcagtcagcgacaaggctcccagccctgccaccctgccagccacctcctcctccctgcccagcccagccaccccatcccatggctctcccagttcccatgggcctccagccacccaccctacctcccccactcccccttcgacagccagtggggccaccacagctgccaacgggggtagcttgaactgcctgcagacaccatcctccaccagcagggggcgcaagatgactgtcaacggcgctcccgtgccccccttaacttgaggccagggaccctctcccttcttccagccaagcctctccactccttccactttttctgggcccttttttccacttcttctactttccccagctcttcccaccttgggggtggggggcgggttttataaataaatatatatatatatgtacataggaaaaaccaaatatacatacttattttctatggaccaaccagattaatttaaatgccacaggaaacaaactttatgtgtgtgtgtatgtgtggaaaatggtgttcattttttttggggggggtcttgtgtaatttgctgtttttgggggtgcctggagatgaactggatgggccactggagtctcaataaagctctgcaccatcctcgctgtttcccaaggcaggtggtgtgttgggggccccttcagacccaaagctttaggcatgattccaactggctgcatataggagtcagttagaattgtttctttctctccccgtttctctccccatcttggctgctgtcctgcctctgaccagtggccgccccccgcgttgttgaatgtccagaaattgctaagaacagtgccttttacaaatgcagtttatccctggttctgaggagcaagtgcagggtggaggtggcacctgcatcacctcctcctcttgcagtggaaactttgtgcaaagaatagatagttctgcctcttttttttttttttcctgtgtgtgtggcctttgcatcatttatcttgtggaaaagaagattcaggccctgagaggtctcagctcttggaggagggctaaggctttagcattgtgaagcgctgcacccccaccaaccttaccctcaccggggaaccctcactagcaggactggtggtggagtctcacctggggcctagagtggaagtgggggtgggttaacctcacacaagcacagatcccagactttgccagaggcaaacagggaattccgccgatactgacgggctccaggagtcgtcgccacactcg

SEQ ID NO: 331 - DNA, 254 bp, Homo sapiens
  3' terminal sequence. macrophage stimulating 1 (hepatocyte growth factor-like) (MST1) gene.
gcataaagaggaaacatggctttatgtctgacaagaagttttgtcctccccaaggcatatggcatcaaggctgggctaacccagtctcatgaccttgtgaatccagtccacaaacacagagacacgcgtgaagacagctggccagcgggaccttgcgcatactcggttggggattataattccttccagggacccagcagttgtgggtaaagcaggcaagtgggcccccgtagtcaccctcacaggcccccaca

SEQ ID NO: 332 - DNA, 362 bp, Homo sapiens
  5' terminal sequence. macrophage stimulating 1 (hepatocyte growth factor-like) (MST1) gene.
  modified_base (8): a, t, c or g
  modified_base (247): a, t, c or g
  modified_base (269): a, t, c or g
  modified_base (280): a, t, c or g
  modified_base (302): a, t, c or g
  modified_base (309): a, t, c or g
  modified_base (336): a, t, c or g
  modified_base (342): a, t, c or g
gccatggncctggtgctacacgatggacccaaggaccccattcgactactgtgccctgcgacgctgcgctgatgaccagccgccatcaatcctggaccccccagaccaggtgcagtttgagaagtgtggcaagagggtggatcggctggatcagcggcgttccaagctgcgctggttgggggccatccgggcaactcaccctggacagtcagcttgcggaatcggcagggccagcatttctgcgggnggtctctagtgaaggagcagtngatactgactncccggaagtgcttctcctcctnccatatncctctcacgggctatgaggtatggttngggcancctttttccagaacccacag

SEQ ID NO: 333 - DNA, 2219 bp, Homo sapiens
  macrophage stimulating 1 (hepatocyte growth factor-like) (MST1) gene.
agccagaaggatggggtggctcccactcctgctgcttctgactcaatgcttaggggtccctgggcagcgctcgccattgaatgacttccaagtgctccggggcacagagctacagcacctgctacatgcggtggtgcccgggccttggcaggaggatgtggcagatgctgaagagtgtgctggtcgctgtgggcccttaatggactgccgggccttccactacaacgtgagcagccatggttgccaactgctgccatggactcaacactcgccccacacgaggctgcggcgttctgggcgctgtgacctcttccagaagaaagactacgtacggacctgcatcatgaacaatggggttgggtaccggggcaccatggccacgaccgtgggtggcctgccctgccaggcttggagccacaagttcccgaatgatcacaagtacacgcccactctccggaatggcctggaagagaacttctgccgtaaccctgatggcgaccccggaggtccttggtgctacacaacagaccctgctgtgcgcttccagagctgcggcatcaaatcctgccgggaggccgcgtgtgtctggtgcaatggcgaggaataccgcggcgcggtagaccgcacggagtcagggcgcgagtgccagcgctgggatcttcagcacccgcaccagcaccccttcgagccgggcaagttcctcgaccaaggtctggacgacaactattgccggaatcctgacggctccgagcggccatggtgctacactacggatccgcagatcgagcgagagttctgtgacctcccccgctgcgggtccgaggcacagccccgccaagaggccacaactgtcagctgcttccgcgggaagggtgagggctaccggggcacagccaataccaccactgcgggcgtaccttgccagcgttgggacgcgcaaatcccgcatcagcaccgatttacgccagaaaaatacgcgtgcaaagaccttcgggagaacttctgccggaaccccgacggctcagaggcgccctggtgcttcacactgcggcccggcatgcgcgcggccttttgctaccagatccggcgttgtacagacgacgtgcggccccaggactgctaccacggcgcaggggagcagtaccgcggcacggtcagcaagacccgcaagggtgtccagtgccagcgctggtccgctgagacgccgcacaagccgcagttcacgtttacctccgaaccgcatgcacaactggaggagaacttctgccggaacccagatggggatagccatgggccctggtgctacacgatggacccaaggaccccattcgactactgtgccctgcgacgctgcgctgatgaccagccgccatcaatcctggaccccccagaccaggtgcagtttgagaagtgtggcaagagggtggatcggctggatcagcggcgttccaagctgcgcgtggttgggggccatccgggcaactcaccctggacagtcagcttgcggaatcggcagggccagcatttctgcggggggtctctagtgaaggagcagtggatactgactgcccggcagtgcttctcctcctgccatatgcctctcacgggctatgaggtatggttgggcaccctgttccagaacccacagcatggagagccaagcctacagcgggtcccagtagccaagatggtgtgtgggccctcaggctcccagcttgtcctgctcaagctggagagatctgtgaccctgaaccagcgtgtggccctgatctgcctgccccctgaatggtatgtggtgcctccagggaccaagtgtgagattgcaggctggggtgagaccaaaggtacgggtaatgacacagtcctaaatgtggcctttctgaatgttatctccaaccaggagtgtaacatcaagcaccgaggacgtgtgcgggagagtgagatgtgcactgagggactgttggcccctgtgggggcctgtgagggtgactacgggggcccacttgcctgctttacccacaactgctgggtcctggaaggaattataatccccaaccgagtatgcgcaaggtcccgctggccagctgtcttcacgcgtgtctctgtgtttgtggactggattcacaaggtcatgagactgggttaggcccagccttgatgccatatgccttggggaggacaaaacttcttgtcagacataaagccatgtttcctcttta

SEQ ID NO: 334 - DNA, 431 bp, Homo sapiens
  3' terminal sequence. glutathione s-transferase pi (GSTP1) gene.
  modified_base (22): a, t, c or g
  modified_base (101): a, t, c or g
  modified_base (106): a, t, c or g
  modified_base (109): a, t, c or g
  modified_base (188): a, t, c or g
  modified_base (217): a, t, c or g
  modified_base (233): a, t, c or g
  modified_base (352): a, t, c or g
  modified_base (421): a, t, c or g
  modified_base (426): a, t, c or g
gaaaggaaggcaaactctgccncccgctcagagtccccccaaccctcactgtttcccgttgccattgatggggaggttcacgtactcaggggaggccaggnaggcntgnagcttgggccgggcactgaggcgccccacatatgctgagagcagggggaacgcatccaggcagccagggctagggaccncatggatcagcagcaagtccagcaggttntagtcagcgaaggagntctggtctcccacaatgaaggtcttgcctccctggttctgggacagcagggtctcaaaaggcttcagttgcccgggcagtgccttcacatagtcatccttgcccgcctcatagttggtntagatgagggagatgtatttgcagcggaggtcctccacgccgttcatttcacctgtccaccagggctgnctccnttttt

SEQ ID NO: 335 - DNA, 305 bp, Homo sapiens
  5' terminal sequence. glutathione s-transferase pi (GSTP1) gene.
  modified_base (1): a, t, c or g
  modified_base (117): a, t, c or g
  modified_base (201): a, t, c or g
  modified_base (255): a, t, c or g
  modified_base (277): a, t, c or g
  modified_base (295): a, t, c or g
nattcggcacaggtcgccaccatgccgccctacaccgtggtctatttcccagttcgaggccgctgcctgtcggcaatgctgctggcagatcagggccagagctggaaggaggaggtngtgaccgtggagacgtggcaggagggctcactcaaagcctcctgcctatacgggcagctccccaagttccaggacggagacctnaccctgtaccagtccaataccatcctgcgtcacctgggccgcacccttgggctnctatgggaaggaccagcaggangcagccctggtggacatngtgaatgacg

SEQ ID NO: 336 - DNA, 737 bp, Homo sapiens
  glutathione s-transferase pi (GSTP1) gene.
ggagtttcgccgccgcagtcttcgccaccatgccgccctacaccgtggtctatttcccagttcgaggccgctgcgcggccctgcgcatgctgctggcagatcagggccagagctggaaggaggaggtggtgaccgtggagacgtggcaggagggctcactcaaagcctcctgcctatacgggcagctccccaagttccaggacggagacctcaccctgtaccagtccaataccatcctgcgtcacctgggccgcacccttgggctctatgggaaggaccagcaggaggcagccctggtggacatggtgaatgacggcgtggaggacctccgctgcaaatacatctccctcatctacaccaactatgaggcgggcaaggatgactatgtgaaggcactgcccgggcaactgaagccttttgagaccctgctgtcccagaaccagggaggcaagaccttcattgtgggagaccagatctccttcgctgactacaacctgctggacttgctgctgatccatgaggtcctagcccctggctgcctggatgcgttccccctgctctcagcatatgtggggcgcctcagcgcccggcccaagctcaaggccttcctggcctcccctgagtacgtgaacctccccatcaatggcaacgggaaacagtgagggttggggggactctgagcgggaggcagagtttgccttcctttctccaggaccaataaaatttctaagagagct

SEQ ID NO: 337 - DNA, 372 bp, Homo sapiens
  3' terminal sequence. b-cell cll/lymphoma 2 (BCL2) gene.
  modified_base (6): a, t, c or g
  modified_base (152): a, t, c or g
  modified_base (164): a, t, c or g
  modified_base (211): a, t, c or g
  modified_base (229): a, t, c or g
  modified_base (236): a, t, c or g
  modified_base (304): a, t, c or g
gtgggnctgtgttgaaacaggccacgtaaagcaactctctaaaggtcaaaccaccatagatttgaatctgctggtcattcgccatctggatttttaactgaatgaatctcatgggtttaaccaaacatgcatgtaatcctgaataccatganttaaatgcgganttgcccagggacgaggaaaccttcaagaaacaaggtcaaagggacancagatataactgtcacantaaacanttctgttgacgtgggaaatgcacatgacttggttgaaacaaagctcctcagtgggccagtgacatccngggtttttcttagggtaggctgaggactcaggggcttatctcaccttctcaggaatgctttttgaagg

SEQ ID NO: 338 - DNA, 508 bp, Homo sapiens
  5' terminal sequence. b-cell cll/lymphoma 2 (BCL2) gene.
  modified_base (1): a, t, c or g
  modified_base (416): a, t, c or g
nttcggcacagactttttttaagctaccaattgtgccgagaaaagcattttagcaatttatacaatatcatccagtaccttaaaccctgattgtgtatattcatatattttggatacgcaccccccaactcccaatactggctctgtctgagtaagaaacagaatcctctggaacttgaggaagtgaacatttcggtgacttccgcatcaggaaggctagagttacccagagcatcaggccgccacaagtgcctgcttttaggagaccgaagtccgcagaacctgcctgtgtcccagcttggaggcctgggtcctgggaactgagccggggccctcactggccttccttccaggggatggatcaacaggggcagtgtggtcttccgaatgtctgggaagctgatgggagctcagantttccactgtcaagaaagaggcagttaggaggggtttgggtggggcttgttcacctggggggccttccaggtagggccctttttaagtggga

SEQ ID NO: 339 - DNA, 445 bp, Homo sapiens
  3' terminal sequence. proliferating cell nuclear antigen (PCNA) gene.
  modified_base (9): a, t, c or g
  modified_base (180): a, t, c or g
  modified_base (190): a, t, c or g
  modified_base (202): a, t, c or g
  modified_base (241): a, t, c or g
  modified_base (243): a, t, c or g
  modified_base (251): a, t, c or g
  modified_base (300): a, t, c or g
  modified_base (315): a, t, c or g
  modified_base (330): a, t, c or g
  modified_base (359): a, t, c or g
  modified_base (376): a, t, c or g
  modified_base (386): a, t, c or g
  modified_base (399): a, t, c or g
  modified_base (414): a, t, c or g
  modified_base (423): a, t, c or g
  modified_base (435): a, t, c or g
tttttttantcaaaagtttgaaattcaagtaactttatttaaattcaaaaacaattcttaaaactgcatttagagtcaagacccttttgtattataaaaatcacaagtatttctaagagacaaaaatacttctaggttaactagaccagatctgactttggactttattctttaaacaanttgcagagantagagaaaaaantaggttatttacagaaaacaatatctacatatgtacttngnggtacaantttgggtgacagaaaagacttcaggtatatgctgggcatcttaggaagncagttctcaaagggncttaggttttatttncttggatttttaaggattgccctaaggancccttcttcatcctcgntcttgggggnggccaggtaggtnttttaggtgtccccntatcccganttttatactctncaccgggggg

SEQ ID NO: 340 - DNA, 437 bp, Homo sapiens
  5' terminal sequence. proliferating cell nuclear antigen (PCNA) gene.
  modified_base (286): a, t, c or g
  modified_base (327): a, t, c or g
  modified_base (396): a, t, c or g
  modified_base (434): a, t, c or g
gctccagcgttgtaaacctgcagagatggactcgtcccacgtctctttggtgcagctcaccctgcggtctgagggcttcgacacctaccgctgcgaccgcaacctggccatggggtgaacctcaccagtatgtccaaaatactaaaatgcgccggcaatgaagatatcattacactaagggccgaagataacgcggataccttggcgctagtatttgaagcaccaaaccaggagaaagtttcagactatgaaatgaagttgatggatttagatgttgaacaacttngaattccagaacaggagtacagctgtgtagtaaagatgccntctggtgaatttgcacgtatatgccgagatctcagccatattgggagatgctgttgtaatttcctgtgncaaaagacgggagtgaaaatttttctgcaagtgggagnact

SEQ ID NO: 341 - DNA, 1231 bp, Homo sapiens
  proliferating cell nuclear antigen (PCNA) gene.
aggtctcagccggtcgtcgcgacgttcgcccgctcgctctgaggctcctgaagccgaaactagctagactttcctccttcccgcctgcctgtagcggcgttgttgccactccgccaccatgttcgaggcgcgcctggtccagggctccatcctcaagaaggtgttggaggcactcaaggacctcatcaacgaggcctgctgggatattagctccagcggtgtaaacctgcagagcatggactcgtcccacgtctctttggtgcagctcaccctgcggtctgagggcttcgacacctaccgctgcgaccgcaacctggccatgggcgtgaacctcaccagtatgtccaaaatactaaaatgcgccggcaatgaagatatcattacactaagggccgaagataacgcggataccttggcgctagtatttgaagcaccaaaccaggagaaagtttcagactatgaaatgaagttgatggatttagatgttgaacaacttggaattccagaacaggagtacagctgtgtagtaaagatgccttctggtgaatttgcacgtatatgccgagatctcagccatattggagatgctgttgtaatttcctgtgcaaaagacggagtgaaattttctgcaagtggagaacttggaaatggaaacattaaattgtcacagacaagtaatgtcgataaagaggaggaagctgttaccatagagatgaatgaaccagttcaactaacttttgcactgaggtacctgaacttctttacaaaagccactccactctcttcaacggtgacactcagtatgtctgcagatgtaccccttgttgtagagtataaaattgcggatatgggacacttaaaatactacttggctcccaagatcgaggatgaagaaggatcttaggcattcttaaaattcaagaaaataaaactaagctctttgagaactgcttctaagatgccagcatatactgaagtcttttctgtcaccaaatttgtacctctaagtacatatgtagatattgttttctgtaaataacctattttttttctctattctctccaatttgtttaaagaataaagtccaaagtctgatctggtctagttaacctagaagtatttttgtctcttagaaatacttgtgatttttataatacaaaagggtcttgactctaaatgcagttttaagaagtgtttttgaatttaaataaagttacttgaatttcaaac

SEQ ID NO: 342 - DNA, 383 bp, Homo sapiens
  3' terminal sequence. adenovirus 5 e1a binding protein (BS69) gene.
  modified_base (20): a, t, c or g
  modified_base (272): a, t, c or g
ttttttttttaaacacacangttttcacgctgtagtaacttggaaatgtgcaacccgtgtcaacagagacagaaaagccaaagtaacacgaatctcactttcatgcagctatcagttaaatattacatactctggaatgattttacaccaaaaatatttccacaattacttgctctcataggggtggatcgaagtcttaaaacttgaaaaacaatcaaagaaggttaagtgttctcggttctgacatctccatcagcgccacacactgtggngaacactggactaattacacagcaacaaggaggggaacgatgatgccaagttactgcataatttagggtacattgtatggaatggggggctactgggggtactttttttac

SEQ ID NO: 343 - DNA, 483 bp, Homo sapiens
  5' terminal sequence. adenovirus 5 e1a binding protein (BS69) gene.
  modified_base (4): a, t, c or g
  modified_base (371): a, t, c or g
  modified_base (478): a, t, c or g
gttnaaattgcagggactggggtaatcttttactgagctggatcttagagaaaatgaatatttaaattttaaagtttgcacatttcatctttgtcctaacatgagtgcttgtaacaaaataaacaacaaaaacaaagccaaaaactacctttatccatatgtgaaattatagatgaggcatacgaatttgtttaatgcttcccttcccttcccacatatcatctcactgcctattatctggtgtcacctcatgtatcgtaagttaatactaaaagaagagaaagcacttaagtttcacagaagccgttatgtttgtaggtaatggggtcattgcctaatggaactccatcactgtacacagaatgaagganttaatgccatgttaattttcttgttatttaaggatgccgtggatttggtaaaaggtctggtattttgcggggatgtctggggttagggaggccttacccataggggntgggg

SEQ ID NO: 344 - DNA, 2722 bp, Homo sapiens
  adenovirus 5 e1a binding protein (BS69) gene.
ggagcataatgctaaagaagtaaacaggtcatggcacgtttaacaaaaagacgacaggcgatacaaaagctatccagcatctttgggcagccattgagattatacggaaccagaagcagattgccaacattgaccgtattacaaaatgtgaaacaactacattattcttgaacctatggtgatttttacatcattacacagatatgtcattttcattagttgtatcattgttataaactggtatatgtctcgagtccacggtatgcaccctaaagagaccacccgtcagctgagcttagctgtgaaagatggtcttattgtcgaaactctaacagtgggctgcaaaggttcaaaagctggtattgaacaagaaggatattggttgccaggagatgagattgactgggaaacagaaaatcatgactggtattgttttgaatgccatttgcctggagaggtgttgatatgtgacctgtgttttcgtgtgtatcattccaagtgtttgtctgatgagttcaggcttagagacagcagtagtccctggcagtgcccagtttgcaggagcattaagaagaagaatacaaacaaacaggagatgggcacatacctcagattcattgtctcccgcatgaaggagagggctatagatcttaataaaaaggggaaggacaataaacacccgatgtacaggaggctggtgcactcagctgtggacgttcccaccattcaagagaaagtgaatgaagggaaataccgaagttatgaagagttcaaagctgatgcccaattgcttctccacaataccgtgattttctatggagcagacagtgagcaagctgacattgcgaggatgctatataaagacacatgtcatgagctggatgaactgcagctttgcaagaattgcttttacttgtcaaatgctcgtcctgacaactggttctgttatccttgtatacctaatcatgagctggtttgggctaaaatgaaaggttttgggttttggccagccaaagtcatgcagaaagaagacaatcaagtcgacgttcgcttctttggccaccaccaccagagggcctggattccttctgaaaacattcaagatatcacagtcaacattcatcggctgcacgtgaagcgcagtatgggttggaaaaaggcctgtgatgagctggagctgcatcagcgtttcctacgagaagggagattttggaaatctaagaatgaggaccgaggtgaggaagaggcagaatccagtatctcctccaccagtaatgagcagctaaaggtcactcaagaaccaagagcaaagaaaggacgacgtaatcaaagtgtggagcccaaaaaggaagaaccagagcctgaaacagaagcagtaagttctagccaggaaatacccacgatgcctcagcccatcgaaaaagtctccgtgtcaactcagacaaagaagttaagtgcctcttcaccaagaatgctgcatcggagcacccagaccacaaacgacggcgtgtgtcagagcatgtgccatgacaaatacaccaagatcttcaatgacttcaaagaccggatgaagtcggaccacaagcgggagacagagcgtgttgtccgagaagctctggagaagctgcgttctgaaatggaagaagaaaagagacaagctgtaaataaagctgtagccaacatgcagggtgagatggacagaaaatgtaagcaagtaaaggaaaagtgtaaggaggaatttgtagaagaaatcaagaagctggcaacacagcacaagcaactgatttctcagaccaagaagaagcagtggtgctacaactgtgaggaggaggccatgtaccactgctgctggaacacatcctactgctccatcaagtgccagcaggagcactggcacgcggagcacaagcgcacctgccgccggaaaagatgaagctggcccttcccggagtcaccccgatgattactcttttcagacacagcggtttttgtttccaagaagccaaaattgtttagaatttgcttcccattttgcaccagcctttaaacacttttcgtgaagaaattttgcacagtagtttaaatcttttgttaatgctcctccgaagtttttcagggggtaaaagtaacatcagtggagggtattattttaaataaattttaattgagaatttgttgcattttcagcaaattttaaaacatttttaggttttacagagattttaacctttaaacaacagatctttaaaaaacaggtgaatacaagtgagtttaacaaagaaacatttagaatagatctgaatgtaagaactacagaactgtttcagaaataaaacatactaccttgatgtgacatttttttcttaaccttgttgagctggttttgttcagcttaatttactgttcaaaggcattatctgttggtcacaccagtgggtatatgattgaatttagggaacagggttgacacagcagggctagtcctgcatattttttcttaaatatttcccaattgtgtttttcattatttcttttcaatatataacttttataacaaattattagctttgatcttgtagtttaaaattgcagggaactggggtaatcttttactgagctggatcttagagaaaatgaatatttaaattttaaagtttgccacatttcatctttgtcctaacatgagtgcttgtaacaaaataaaacaacaaaaacaaagcct

SEQ ID NO: 345 - DNA, 363 bp, Homo sapiens
  3' terminal sequence. matrix metalloproteinase 11 (stromelysin 3) (MMP11) gene.
  modified_base (69): a, t, c or g
  modified_base (74): a, t, c or g
  modified_base (342): a, t, c or g
gcatgcagcatcctgagtggtagcgtcgatctcagagggcacccctctccagtcagtggccctgcgggnacggngactgtctacacgccgggtgctggggtggaaacgccagtagtccctgcctcggaagaagtagatcttgttcttctcgggaccccagaccaaggcagcatggaccgggaacctcaccagggcccagctcggtgaggggtgcggggcccagggactggcttttcaccgtcgtacacccagtacttgagcaccttgggaagaaccaaatgtgggcccggcttacccagcattggccttttcgccacagggctggggcagtccctgccagtngcgagaagccaattttgggca

SEQ ID NO: 346 - DNA, 2260 bp, Homo sapiens
  matrix metalloproteinase 11 (stromelysin 3) (MMP11) gene.
aagcccagcagccccggggcggatggctccggccgcctggctccgcagcgcggccgcgcgcgccctcctgcccccgatgctgctgctgctgctccagccgccgccgctgctggcccgggctctgccgccggacgtccaccacctccatgccgagaggagggggccacagccctggcatgcagccctgcccagtagcccggcacctgcccctgccacgcaggaagccccccggcctgccagcagcctcaggcctccccgctgtggcgtgcccgacccatctgatgggctgagtgcccgcaaccgacagaagaggttcgtgctttctggcgggcgctgggagaagacggacctcacctacaggatccttcggttcccatggcagttggtgcaggagcaggtgcggcagacgatggcagaggccctaaaggtatggagcgatgtgacgccactcacctttactgaggtgcacgagggccgtgctgacatcatgatcgacttcgccaggtactggcatggggacgacctgccgtttgatgggcctgggggcatcctggcccatgccttcttccccaagactcaccgagaaggggatgtccacttcgactatgatgagacctggactatcggggatgaccagggcacagacctgctgcaggtggcagcccatgaatttggccacgtgctggggctgcagcacacaacagcagccaaggccctgatgtccgccttctacacctttcgctacccactgagtctcagcccagatgactgcaggggcgttcaacacctatatggccagccctggcccactgtcacctccaggaccccagccctgggcccccaggctgggatagacaccaatgagattgcaccgctggagccagacgccccgccagatgcctgtgaggcctcctttgacgcggtctccaccatccgaggcgagctctttttcttcaaagcgggctttgtgtggcgcctccgtgggggccagctgcagcccggctacccagcattggcctctcgccactggcagggactgcccagccctgtggacgctgccttcgaggatgcccagggccacatttggttcttccaaggtgctcagtactgggtgtacgacggtgaaaagccagtcctgggccccgcacccctcaccgagctgggcctggtgaggttcccggtccatgctgccttggtctggggtcccgagaagaacaagatctacttcttccgaggcagggactactggcgtttccaccccagcacccggcgtgtagacagtcccgtgccccgcagggccactgactggagaggggtgccctctgagatcgacgctgccttccaggatgctgatggctatgcctacttcctgcgcggccgcctctactggaagtttgaccctgtgaaggtgaaggctctggaaggcttcccccgtctcgtgggtcctgacttctttggctgtgccgagcctgccaacactttcctctgaccatggcttggatgccctcaggggtgctgacccctgccaggccacgaatatcaggctagagacccatggccatctttgtggctgtgggcaccaggcatgggactgagcccatgtctcctgcagggggatggggtggggtacaaccaccatgacaactgccgggagggccacgcaggtcgtggtcacctgccagcgactgtctcagactgggcagggaggctttggcatgacttaagaggaagggcagtcttgggacccgctatgcaggtcctggcaaacctggctgccctgtctcatccctgtccctcagggtagcaccatggcaggactgggggaactggagtgtccttgctgtatccctgttgtgaggttccttccaggggctggcactgaagcaagggtgctggggccccatggccttcagccctggctgagcaactgggctgtagggcagggccacttcctgaggtcaggtcttggtaggtgcctgcatctgtctgccttctggctgacaatcctggaaatctgttctccagaatccaggccaaaaagttcacagtcaaatggggaggggtattcttcatgcaggagaccccaggccctggaggctgcaacatacctcaatcctgtcccaggccggatcctcctgaagcccttttcgcagcactgctatcctccaaagccattgtaaatgtgtgtacagtgtgtataaaccttcttcttcttttttttttttaaactgaggattgtcattaaacacagttgttttct

SEQ ID NO: 347 - DNA, 273 bp, Homo sapiens
  3' terminal sequence. hypothetical protein mgc13071 (MGC13071) gene.
  modified_base (199): a, t, c or g
  modified_base (243): a, t, c or g
atgtttattgaacgtaacagtatatttcatgtagtttcccataattttttcatgtactaactcatgtaattctttgttttttagagatctgaagtgattttacctttacttccttcactttaagccaatcatgaaatttcagtgatttctggggtgagggcgaaaggtggtgttacgaatcatcggggctgtggccagnttgcctcacggaggtgcaggtaggctggggcctcactagggcanctggaggagcacggactgccctgccggcag

SEQ ID NO: 348 - DNA, 330 bp, Homo sapiens
  5' terminal sequence. hypothetical protein mgc13071 (MGC13071) gene.
  modified_base (99): a, t, c or g
  modified_base (318): a, t, c or g
  modified_base (326): a, t, c or g
ggagtacagaacattgtggtaggggaagggactcactttctcatcccatgtgtacaaaaaccaattatctttgactgctgttctcaaccacgtagtcgnccagtcatcactggtagcaaagatttacagaatgtcaacatcacactgtgcatcctcttccggcccatcactagccagcttcctcgcatcttcaccagcattggagaggactacgatgagtgtgtgctgccgttcattaccacggagatcctcaagtcactggtggctcgctttgatgctggagaactaatcacccagagggagcttggtttccagccnggtgaagnacca

SEQ ID NO: 349 - DNA, 1168 bp, Homo sapiens
  hypothetical protein mgc13071 (MGC13071) gene.
aaatgatgatagtagtacctacagtatagtgctgttagaattacatgagttagatgtggaggtcagagtggaagcaggtgtgagagggtcccgcagaagaaaacatggctgccaaagtgtttgagtccatcggcaagtttggcctggccttagctgttgcaggaggcatggtgacctctgccttatgtaatgtggatgctgggcacagagctgccatctttgaccaattccgtggagtacagaacattgtggtaggggaagggactcactttctcatcccatgtgtacaaaaaccaattatctttgactgctgttctcaaccacgtagtgcgccagtcatcactggtagcaaagatttacagaatgtcaacatcacactgtgcatcctcttccggcccatcactagccagcttcctcgcatcttcaccagcattggagaggactacgatgagtgtgtgctgccgttcattaccacggagatcctcaagtcactggtggctcgctttgatgctggagaactaatcacccagagggagctggtctccagccaggtgagcaacaaccttatggagtgagcagccacctttgggctcattctggacgacgtgtctttgacacatctgaccttcttgaaggagttaacagacaggtggccccccaggaagcagagagcgccagatttgtggtggaaaaggcggccatcatctctgctgagggtgactccaaggcagctgagctgatcgccaactcactggccactgcaggggacggccagagcgagctgtgcaagctggaagctgcagaagacattgcataccagctctcatgctctcggaacatcacctgcctgccggcagggcagtccgtgctcctccagctgccctagtgaggccccagcctacctgcacctccgtgaggcaactgggccacagccccgatgattcgtaacaccacctttcgccctcaccccagaaatcactgaaatttcatgattggcttaaagtgaaggaagtaaaggtaaaatcacttcagatctctaaaaaacaaagaattacatgagttagtacatgaaaaaattatgggaaactacatgaaatatactgttacgttcaataaacattagcttctgtatataaaaaaaaaaaaaaaaaaaaaaaaaaaaaaaaaa

SEQ ID NO: 350 - DNA, 315 bp, Homo sapiens
  5' terminal sequence. interleukin enhancer binding factor 2, 45kd (ILF2) gene.
  modified_base (21): a, t, c or g
  modified_base (185): a, t, c or g
  modified_base (189): a, t, c or g
  modified_base (194): a, t, c or g
  modified_base (223): a, t, c or g
  modified_base (244): a, t, c or g
  modified_base (249): a, t, c or g
  modified_base (264): a, t, c or g
  modified_base (295): a, t, c or g
  modified_base (306): a, t, c or g
ctggctttgaaatcagttctncgtgatgctacagtgaagattctcattacaacagtgccacccaatcttcgaaaactggatccagaactccatttggatatcaaagtattgcagagtgccttagcagccatccgacatgcccgctggttcgaggaaaatgcttctcagtccacagttaaagttcnccancagantactgaaggacttgaggattcgttttccnggctttgagccctcacacccnggatncttgaactactaggncattatgctgtgatgaacaaccccaccaganagcctttggcnctaaacgtt

SEQ ID NO: 351 - DNA, 1552 bp, Homo sapiens
  interleukin enhancer binding factor 2, 45kd (ILF2) gene.
cggttggtgcggcctccattgttcgtgttttaaggcgccatgaggggtgacagaggccgtggtcgtggtgggcgctttggttccagaggaggcccaggaggagggttcaggccctttgtaccacatatcccatttgacttctatttgtgtgaaatggcctttccccgggtcaagccagcacctgatgaaacttccttcagtgaggccttgctgaagaggaatcaggacctggctcccaattctgctgaacaggcatctatcctttctctggtgacaaaaataaacaatgtgattgataatctgattgtggctccagggacatttgaagtgcaaattgaagaagttcgacaggtgggatcctataaaaaggggacaatgactacaggacacaatgtggctgacctggtggtgatactcaagattctgccaacgttggaagctgttgctgccctggggaacaaagtcgtggaaagcctaagagcacaggatccttctgaagttttaaccatgctgaccaacgaaactggctttgaaatcagttcttctgatgctacagtgaagattctcattacaacagtgccacccaatcttcgaaaactggatccagaactccatttggatatcaaagtattgcagagtgccttagcagccatccgacatgcccgctggttcgaggaaaatgcttctcagtccacagttaaagttctcatcagactactgaaggacttgaggattcgttttcctggctttgagcccctcacaccctggatccttgacctactaggccattatgctgtgatgaacaaccccaccagacagcctttggccctaaacgttgcatacaggcgctgcttgcagattctggctgcaggactgttcctgccaggttcagtgggtatcactgacccctgtgagagtggcaactttagagtacacacagtcatgaccctagaacagcaggacatggtctgctatacagctcagactctcgtccgaatcctctcacatggtggctttaggaagatccttggccaggagggtgatgccagctatcttgcttctgaaatatctacctgggatggagtgatagtaacaccttcagaaaaggcttatgagaagccaccagagaagaaggaaggagaggaagaagaggagaatacagaaagaaccacctcaaggagaggaagaagaaagcatggaaactcaggagtgacattcccttcactccttttcctacccaagggaaagactggagcctaagctgcctgctactggctttacatggtgacagacattccgtggataggaagatagcaggagaaagtaactccatagagtgtcattccactggttgatattggcttagctgccagtctcccatttgtgacctatgccatccatctataatggaggataccaacatttcttcctaatattctataatctccaactcctgaaaacccctctctcaactaatactttgctgttgaaatgttgtgaaatgttaagtgtctggaaatttttttttctaagaaaaactattaaagtactt

SEQ ID NO: 352 - DNA, 396 bp, Homo sapiens
  3' terminal sequence. hypothetical protein flj11307 (FLJ11307) gene.
  modified_base (376): a, t, c or g
ctccattacagggtttttgccacttgctgtgaggatagggccctgagttcttacctctaaggtactggaggtttcagttgtagaatttccagtattattgcttgagtttgaagacactgtttcatttttactttcattatctgatttttcatcggaactcatacattcaatatctgcatcaaagcctgttggatatcccattgcctgcaataccttcaccgctacgtgaaagttttgctgttttcttggatggtcctgaggcttcatatgttgtgccatccacatctacagacattgtgaagactgggggcatgaacgggggccagactgaagataagaagctatactgaagcacaggcctgatctgaattaagcntcattagtggcattccataa

SEQ ID NO: 353 - DNA, 1858 bp, Homo sapiens
  hypothetical protein flj11307 (FLJ11307) gene.
tcgatgaaagatcctccggacttattggacaggcagaaatgcccgaacgccttggcgtctcttcgacatgccaaatggtttcaggcaagggcaaatggattaaaatcatgtgtaattgtcctccgcattctgcgtgatttgtgcaacagagtccccacatgggcaccattgaaaggatggccactagaacttatatgtgaaaagtctataggtacttgtaatagacctttgggcgctggggaggccttgagacgagtaatggagtgtttggcatctggaatactacttcctgggggtcctggtcttcatgatccttgtgagcgagacccaacagatgctctgagctatatgaccatccagcaaaaagaagatattacccacagtgcacagcatgcactcagactatcagcctttggccagatttacaaagtgctggagatggacccccttccatctagtaagccttttcagaagtattcctggtcagttactgataaagaaggtgctgggtcttcagctctaaagaggccatttgaagatggattaggggatgataaagaccccaacaagaagatgaaacgaaacttaaggaaaattctggatagtaaagcaatagaccttatgaatgcactaatgaggctaaatcagatcaggcctgggcttcagtataagctcctatctcagtctggccccgttcatgccccagtcttcacaatgtctgtagatgtggatggcacaacatatgaagcctcaggaccatccaagaaaacagcaaaacttcacgtagcggtgaaggtattgcaggcaatgggatatccaacaggctttgatgcagatattgaatgtatgagttccgatgaaaaatcagataatgaaagtaaaaatgaaacagtgtcttcaaactcaagcaataatactggaaattctacaactgaaacctccagtaccttagaggtaagaactcagggccctatcctcacagcaagtggcaaaaaccctgtaatggagctcaatgaaaaaagaagaggtctcaagtatgaactcatctcagagactggtggaagccatgacaagcgctttgtaatggaggtagaagtagatggacagaaattcagaggcgcaggtccaaataagaaagtggcaaaggcgagtgcagctttagctgccttggagaaactgttttctggacccaatgcggcaaataataagaaaaagaagattatccctcaggcaaagggcgttgtgaatacagctgtgtctgcagcagtccaagctgttcggggcagaggaagaggaactctaacaaggggagcttttgttggggcgacagctgctcctggctacatagctccaggctatggaacaccatatggttacagcacagctgcccctgcctatggtttacccaagagaatggttctgttacccgttatgaaatttccaacatatcctgttccccactactcattcttttagcaaatgacagaagctaattcctattgaacaacaatacagtacaacacagaatgttagagaaaaagcctttttatcctgctttctttgaacacatacttgatcaaaattatttgtaaagaacatctttcctactttttgattttaacaaatgcaaatttagttctctaaaacttgaaaaaaaaaaaagaaaccagttctgtgaaaacggtacctcatttctggaaaataacttataccagcccttctgttctagggaaataaaagtctagcagttcaaagtttaagttttaagagacgtatcagattatgtaaaattaaatttgtgaaggatgtatagagtctcaaacactgatcacaaataaactgctttgttgtaacacag

SEQ ID NO: 354 - DNA, 242 bp, Homo sapiens
  5' terminal sequence. v-myb avian myeloblastosis viral oncogene homolog (MYB) gene.
  modified_base (231): a, t, c or g
agaaccccagctatcaaaaggtcaatcttagaaagctctccaagaactcctacaccattcaaacatgcacttgcagctcaagaaattaaatacggtcccctgaagatgctacctcagacaccctctcatctagtagaagatctgcaggatgtgatcaaacaggaatctgatgaatctggaattgttgctgagtttcaacgaaaatggaccacccttactgaacgaaaatcntacaacgaggt

SEQ ID NO: 355 - DNA, 3225 bp, Homo sapiens
  v-myb avian myeloblastosis viral oncogene homolog (MYB) gene.
ggcggcagcgccctgccgacgccggggagggacgcaggcaggcggcgggcagcgggaggcggcaccccggtgctccccgcggctctcggcggagccccgccgcccgccgcgccatggcccgaagaccccggcacagcatatatagcagtgacgaggatgatgaggactttgagatgtgtgaccatgactatgatgggctgcttcccaagtctggaaagcgtcacttggggaaaacaaggtggacccgggaagaggatgaaaaactgaagaagctggtggaacagaatggaacagatgactggaaagttattgccaattatctcccgaatcgaacagatgtgcagtgccagcaccgatggcagaaagtactaaaccctgagctcatcaagggtccttggaccaaagaagaagatcagagagtgatagagcttgtacagaaatacggtccgaaacgttggtctgttattgccaagcacttaaaggggagaattggaaaacaatgtagggagaggtggcataaccacttgaatccagaagttaagaaaacctcctggacagaagaggaagacagaattatttaccaggcacacaagagactggggaacagatgggcagaaatcgcaaagctactgcctggacgaactgataatgctatcaagaaccactggaattctacaatgcgtcggaaggtcgaacaggaaggttatctgcaggagtcttcaaaagccagccagccagcagtggccacaagcttccagaagaacagtcatttgatgggttttgctcaggctccgcctacagctcaactccctgccactggccagcccactgttaacaacgactattcctattaccacatttctgaagcacaaaatgtctccagtcatgttccataccctgtagcgttacatgtaaatatagtcaatgtccctcagccagctgccgcagccattcagagacactataatgatgaagaccctgagaaggaaaagcgaataaaggaattagaattgctcctaatgtcaaccgagaatgagctaaaaggacagcaggtgctaccaacacagaaccacacatgcagctaccccgggtggcacagcaccaccattgccgaccacaccagacctcatggagacagtgcacctgtttcctgtttgggagaacaccactccactccatctctgccagcggatcctggctccctacctgaagaaagcgcctcgccagcaaggtgcatgatcgtccaccagggcaccattctggataatgttaagaacctcttagaatttgcagaaacactccaatttatagattctttcttaaacacttccagtaaccatgaaaactcagacttggaaatgccttctttaacttccacccccctcattggtcacaaattgactgttacaacaccatttcatagagaccagactgtgaaaactcaaaaggaaaatactgtttttagaaccccagctatcaaaaggtcaatcttagaaagctctccaagaactcctacaccattcaaacatgcacttgcagctcaagaaattaaatacggtcccctgaagatgctacctcagacaccctctcatctagtagaagatctgcaggatgtgatcaaacaggaatctgatgaatctggatttgttgctgagtttcaagaaaatggaccacccttactgaagaaaatcaaacaagaggtggaatctccaactgataaatcaggaaacttcttctgctcacaccactgggaaggggacagtctgaatacccaactgttcacgcagacctcgcctgtgcgagatgcaccgaatattcttacaagctccgttttaatggcaccagcatcagaagatgaagacaatgttctcaaagcatttacagtacctaaaaacaggtccctggcgagccccttgcagccttgtagcagtacctgggaacctgcatcctgtggaaagatggaggagcagatgacatcttccagtcaagctcgtaaatacgtgaatgcattctcagcccggacgctggtcatgtgagacatttccagaaaagcattatggttttcagaacagttcaagttgacttgggatatatcattcctcaacatgaaacttttcatgaatgggagaagaacctatttttgttgtggtacaacagttgagagcacgaccaagtgcatttagttgaatgaagtcttcttggatttcacccaactaaaaggatttttaaaaataaataacagtcttacctaaattattaggtaatgaattgtagccagttgttaatatcttaatgcagatttttttaaaaaaaaacataaaatgatttatctggtattttaaaggatccaacagatcagtattttttcctgtgatgggttttttgaaatttgacacattaaaaggtactccagtatttcacttttctcgatcactaaacatatgcatatatttttaaaaatcagtaaaagcattactctaagtgtagacttaataccatgtgacatttaatccagattgtaaatgctcatttatggttaatgacattgaaggtacatttattgtaccaaaccattttatgagttttctgttagcttgctttaaaaattattactgtaagaaatagttttataaaaaattatatttttattcagtaatttaattttgtaaatgccaaatgaaaaacgttttttgctgctatggtcttagcctgtagacatgctgctagtatcagaggggcagtagagcttggacagaaagaaaagaaacttggtgttaggtaattgactatgcactagtatttcagactttttaattttatatatatatacattttttttccttctgcaatacatttgaaaacttgtttgggagactctgcattttttattgtggtttttttgttattgttggtttatacaagcatgcgttgcacttcttttttgggagatgtgtgttgttcatgttctatgttttgttttgtgtgtagcctgactgttttataatttgggagttctcgatttgatccgcatcccctgtggtttctaagtgtatggtctcagaactgttgcatggatcctgtgtttgcaactggggagacagaaactgtggttgatagccagtcactgccttaagaacatttgatgcaagatggccagcactgaacttttgagatatgacggtgtacttactgccttgtagcaaaataaagatgtgcccttatttt

SEQ ID NO: 356 - DNA, 369 bp, Homo sapiens
  3' terminal sequence. zinc finger protein 9 (a cellular retroviral nucleic acid binding protein) (ZNF9) gene.
  modified_base (354): a, t, c or g
  modified_base (367): a, t, c or g
gtagttaaatgcagaaagtcggtttttttccacccctttcctccttttacacggcaagtaaagctcactggcctgggagttgcctctatctgccaacctttggccagtgaagaggattcagagaaaataatacaaccatcaatcagaaaaaggaggggcgacaaaggaaaataattaggctgtagctcaattgtgcattcccgtgcaaggtgccctgactcgccacagcggtaacagttgacttcacttgtcttgctgcagttgatggctacatgaccagtttcaccacacctatagcacttcactttggtgcagtcttttttgaatgtgtcccgaattctcccacaagaatancctttctgctcanct

SEQ ID NO: 357 - DNA, 1500 bp, Homo sapiens
  zinc finger protein 9 (a cellular retroviral nucleic acid binding protein) (ZNF9) gene.
gaattccaaacagcctctaccttgcgagccgtcttccccaggcctgcgtccgagtctccgccgctgcgggcccgctccgacgcggaagatctgactgcagccatgagcagcaatgagtgcttcaagtgtggacgatctggccactgggcccgggaatgtcctactggtggaggccgtggtcgtggaatgagaagccgtggcagaggtggttttacctcggatagaggtttccagtttgtttcctcgtctcttccagatatttgttatcgctgtggtgagtctggtcatcttgccaaggattgtgatcttcaggaggatgcctgctataactgcggtagaggtggccacattgccaaggactgcaaggagcccaagagagagcgagagcaatgctgctacaactgtggcaaaccaggccatctggctcgtgactgcgaccatgcagatgagcagaaatgctattcttgtggagaattcggacacattcaaaaagactgcaccaaagtgaagtgctataggtgtggtgaaactggtcatgtagccatcaactgcagcaagacaagtgaagtcaactgttaccgctgtggcgagtcagggcaccttgcacgggaatgcacaattgaggctacagcctaattattttcctttgtcgcccctcctttttctgattgatggttgtattattttctctgaatcctcttcactggccaaaggttggcagatagaggcaactcccaggccagtgagctttacttgccgtgtaaaaggaggaaaggggtggaaaaaaaccgactttctgcatttaactacaaaaaaagtttatgtttagtttggtagaggtgttatgtataatgctttgttaaagaaccccctttccgtgccactggtgaatagggattgatgaatgggaagagttgagtcagaccagtaagcccgtcctgggttccttgaacatgttcccatgtaggaggtaaaaccaattctggaagtgtctatgaacttccataaataactttaattttagtataatgatggtcttggattgtctgacctcagtagctattaaataacatcaagtaacatctgtatcaggccctacatagaacatacagttgagtgggagtaaacaaaaagataaacatgcgtgttaatggctgttcgagagaaatcggaataaaagcctaaacaggaacaacttcatcacagtgttgatgttggacacatagatggtgatggcaaaggtttagaacacattattttcaaagactaaatctaaaacccagagtaaacatcaatgctcagagttagcataatttggagctattcaggaattgcagagaaatgcattttcacagaaatcaagatgttatttttgtatactatatcacttagacaactgtgtttcatttgctgtaatcagtttttaaaagtcagatggaaagagcaactgaagtcctagaaaatagaaatgtaattttaaactattccaataaagctgga

SEQ ID NO: 358 - DNA, 425 bp, Homo sapiens
  3' terminal sequence. camp responsive element modulator (CREM) gene.
  modified_base (124): a, t, c or g
  modified_base (232): a, t, c or g
  modified_base (276): a, t, c or g
  modified_base (281): a, t, c or g
  modified_base (291): a, t, c or g
  modified_base (299): a, t, c or g
  modified_base (307): a, t, c or g
  modified_base (349): a, t, c or g
  modified_base (387): a, t, c or g
  modified_base (395): a, t, c or g
  modified_base (412): a, t, c or g
ttttttacttctgcaagatcttttatattacacagtagagttaaaaactgtagtaaatgttcagatatttaaatgagcaccaaacactacaaagtgcaaccaacatggttctattaaaaactcnctttgactatggcattcaaggacagcaatacaatcttttttttttttaacaaagcaactaatataaaaatctgcaaatgccatatattcatatctaggctattcttcncatataggcatgtcattagatagactttctttctattctttccngaggnatttttttgnggtttacntttattgnactgctggatgcattatttttgatcatcctttcctaaaatgntttaaagacctgcaaataattttattgcataggacacnattggtgncacatagaatgggagcngcaagtatgtggc

SEQ ID NO: 359 - DNA, 232 bp, Homo sapiens
  5' terminal sequence. camp responsive element modulator (CREM) gene.
  modified_base (225): a, t, c or g
  modified_base (228): a, t, c or g
  modified_base (229): a, t, c or g
ggatttagagttaactagctcaccactgcctctgcctccaagctgccttttagactgaatagcttttcttgttagccctactttaacatttcttttgaagtgggtgtctgcttgaagagggaaacacgtcatgaaactgtaatgcatgaacagaactcaggagttgtctggccagcttagtgctgccactggtgacatgccaacttaccagatccgagctcctantgnngct

SEQ ID NO: 360 - DNA, 1431 bp, Homo sapiens
  camp responsive element modulator (CREM) gene.
atgaccatggaaacagttgaatcccagcatgatggaagtataacagcttctttgacagagagcaagtctgctcatgtgcagactcagactgggcaaatttcaatccctgctttagctcagtgcagtgagctgagatcaggcaccagaagaggctccccagctgtaactctagtgcagttaccttcgggccaaactatacatgtccagggagtaattcagacaccacagccatgggttattcagtcatcagaaatacacaccgttcaggtagcagcaattgcagagacagatgaatctgcagaatcagaaggtgtaattgattctcataaacgtagagaaatcctttcacgaagaccctcttataggaaaatactgaatgaactgtcctctgatgtgcctggtgttcccaagattgaagaagagagatcagaggaagaaggaacaccacctagtattgctaccatggcagtaccaactagcatatatcagactagcacggggcaatacattgctatagcccaaggtggaacaatccagatttctaacccaggatctgatggtgttcagggactgcaggcattaacaatgacaaattcaggagctcctccaccaggtgctacaattgtacagtacgcagcacaatcagctgatggcacacagcagttctttgtcccaggcagccaggttgttgttcaagctgccactggtgacatgccaacttaccagatccgagctcctactgctgctttgccacagggagtggtgatggctgcatcgcccggaagtttgcacagtccccagcagctggcagaagaagcaacacgcaaacgagagctgaggctaatgaaaaacagagaagctgcccgggagtgtcgcaggaagaagaaagaatatgtcaaatgtcttgaaaatcgtgtggctgtgcttgaaaaccaaaacaagactctcattgaggaactcaaggccctcaaagatctttattgccataaagtagagtaactgtctttgacttggaccttgtttactctaatcaaggcaggagatgcagcagtcctacttattgccatgtggacttgtgggaaggacacgtgtgacccttaagaatccagtttggattagtgtttgaaattgaattgggaatgttgttccaggatgtggaatgcagcgtgatcacacttaccgagcttactttgatctgtttgtcaatagcatgcaaaaaatgctttgtttgccctttgcttctgctttttttcagggaagctgccaaagaatgtcgacgtcgaaagaaagaatatgtaaaatgcctggagagccgagttgcagtgctggaagtccagaacaagaagcttatagaggaacttgaaaccttgaaagacatttgttctcccaaaactgattactagaaatatttaactatgaactgattacaga

SEQ ID NO: 361 - DNA, 457 bp, Homo sapiens
  3' terminal sequence. cathepsin b (CTSB) gene.
caagttggagaaaccttttattggcacaggcattccttgttaacttgacagggtgaagctgtaatttttcaaaaacagtaaaagctggtttctcctaaactattttccttgtggtagtagagatcagtgggtcagaaacaactcctgaccacttggtttccttttgagccgcgtcattaggaggcaatctgtaaaactagcacaggtctcccgctgttccactggctcacccacatgattagcagagtgcacgaaaaaataaaacttctattaaagaatcatgctgagcacaacatcagagaggttgtgacattgcaaactcgatagatgcagggggcctgggagactggcgttctccaaagggctcccaacaccatctctcctctgatttctgtgacaaatgtggaagctacttgcttggaggtactgggggaactgatgggggaactttcatccg

SEQ ID NO: 362 - DNA, 401 bp, Homo sapiens
  3' terminal sequence. melan-a (MLANA) gene.
  modified_base (233): a, t, c or g
atcatgcattgcaacatttattgatggagttttcccaatttaatatttctcatcatttcctcacatgattagtactgctagcggacctactaaaattttaacactgacttattattagagatggcttgcatttttcctacaccattccaaaggagaacattagatgtctgtattaaattcaagcaaaagtgtgagagaaataatttcagcatgtctcaggtgtctcgctggcncttaaggtgaataaggtggtggtgactgttctgcagagagtttctcataagcaggtggagcattgggaaccacaggttcacagtttttctcttgaagagacactttgctgtcccgatgatcaaacccttcttgtgggcatcttcctgttaaggcacattgaggccaac

SEQ ID NO: 363 - DNA, 370 bp, Homo sapiens
  5' terminal sequence. melan-a (MLANA) gene.
attaaggaaggtgtcctgtgccctgaccctacaagatgccaagagaagatgctcacttcatctatggttaccccaagaaggggcacggccactcttacaccacggctgaagaggccgctgggatcggcatcctgacagtgatcctgggagtcttactgctcatcggctgttggtattgtagaagacgaaatggatacagagccttgatggataaaagtcttcatgttggcactcaatgtgcttaacaagaagatgcccacaagaagggtttgatcatcgggacagcaaagtgtctcttcaagagaaaaactgtgaacctgtggttcccaatgctccacctgcttatggagaaactctctgcagaacagtc

SEQ ID NO: 364 - DNA, 1524 bp, Homo sapiens
  melan-a (MLANA) gene.
agcagacagaggactctcattaaggaaggtgtcctgtgccctgaccctacaagatgccaagagaagatgctcacttcatctatggttaccccaagaaggggcacggccactcttacaccacggctgaagaggccgctgggatcggcatcctgacagtgatcctgggagtcttactgctcatcggctgttggtattgtagaagacgaaatggatacagagccttgatggataaaagtcttcatgttggcactcaatgtgccttaacaagaagatgcccacaagaagggtttgatcatcgggacagcaaagtgtctcttcaagagaaaaactgtgaacctgtggttcccaatgctccacctgcttatgagaaactctctgcagaacagtcaccaccaccttattcaccttaagagccagcgagacacctgagacatgctgaaattatttctctcacacttttgcttgaatttaatacagacatctaatgttctcctttggaatggtgtaggaaaaatgcaagccatctctaataataagtcagtgttaaaattttagtaggtccgctagcagtactaatcatgtgaggaaatgatgagaaatattaaattgggaaaactccatcaataaatgttgcaatgcatgatactatctgtgccagaggtaatgttagtaaatccatggtgttattttctgagagacagaattcaagtgggtattctggggccatccaatttctctttacttgaaatttggctaataacaaactagtcaggttttcgaaccttgaccgacatgaactgtacacagaattgttccagtactatggagtgctcacaaaggatacttttacaggttaagacaaagggttgactggcctatttatctgatcaagaacatgtcagcaatgtctctttgtgctctaaaattctattatactacaataatatattgtaaagatcctatagctctttttttttgagatggagtttcgcttttgttgcccaggctggagtgcaatggcgcgatcttggctcaccataacctccgcctcccaggttcaagcaattctcctgccttagcctcctgagtagctgggattacaggcgtgcgccactatgcctgactaattttgtagttttagtagagacggggtttctccatgttggtcaggctggtctcaaactcctgacctcaggtgatctgcccgcctcagcctcccaaagtgctggaattacaggcgtgagccaccacgcctggctggatcctatatcttaggtaagacatataacgcagtctaattacatttcacttcaaggctcaatgctattctaactaatgacaagtattttctactaaaccagaaattggtagaaggatttaaataagtaaaagctactatgtactgccttagtgctgatgcctgtgtactgccttaaatgtacctatggcaatttagctctcttgggttcccaaatccctctcacaagaatgtgcagaagaaatcataaaggatcagagattctg

SEQ ID NO: 365 - DNA, 556 bp, Homo sapiens
  3' terminal sequence. apr-1 protein (APR-1) gene.
  modified_base (417): a, t, c or g
  modified_base (501): a, t, c or g
  modified_base (545): a, t, c or g
actattcgttaggcttttatttttctctatgttctgcagtaactaaggaaaatcatggtaaatgtcaatcttcacacaacagcagacacaaagggtttcagaaacgtcagatatgaagaaatcctccatccttcttcaacattttactgggtatttcaacttcaaaagaacagcttatttctataagtgctgtacaagatcatagattatgatggaacgacttcattttagaacgttagcaaaactgttatactaaatgtcaatgacaggaaacaaagaaaaaaatttgttcaattatatttttaaacatattgttattctcaacaaacggaattttaaaacgaatacaattttccattatcaaaaagcaaacactctatttcgcagttgaacaatgatcactgatcacaaatatcnaatacagtgtcccccgcccccaatcgacatcattttccacttagggaccctggcatccactccctgggggtacccgtgactccncctttacaccccccaggggctggcctcagatctacctaaggggngggataacccc

SEQ ID NO: 366 - DNA, 464 bp, Homo sapiens
  5' terminal sequence. apr-1 protein (APR-1) gene.
  modified_base (393): a, t, c or g
  modified_base (419): a, t, c or g
aacagcgccaaggaagctctggtctggaaagtgctggggaagttaggaatgcagcctggacgtcagcacagcatctttggagatccgaagaagatcgtcacagaagagtttgtgcgcagagggtacctgatttataaaccggtgccccgtagcagtccggtggagtatgagttcttctgggggccccgagcacacgtggaatcgagcaaactgaaagtcatgcattttgtggcaagggttcgtaaccgatgctctaaagactggccttgtaattatgactgggattcggacgatgatgcagaggttgaggctatcctcaattcaggtgctaggggttattccgccccttaagtagatctggaggcagacccttgggggttgtaaaagagagtnacaggtacccccaaaggagtagatgncaaggggccctaagttgcaaaatgatgtcgattttggggccgggg

SEQ ID NO: 367 - DNA, 1476 bp, Homo sapiens
  apr-1 protein (APR-1) gene.
ctggaagaattcgcgtggcaggagaggcggggccaattttgctgagctttctcgcgggcttgcagctgcggcaagtgctggcggcggctgctcgcgcaagtcagctggcgtgggaactaccctttgtagctgagaacggcttgtttattgctacaaagactctattgacattggtagcttcagcggcagcagcttcttacggtataaagctgttgcttcctgaagaggctacaagcatccttccctaggactgctgtaagctttgagcctctagcaggagacatgcctcggggacgaaagagtcggcgccgccgtaatgcgagagccgcagaagagaaccgcaacaatcgcaaaatccaggcctcagaggcctccgagacccctatggccgcctctgtggtagcgagcacccccgaagacgacctgagcggccccgaggaagacccgagcactccagaggaggcctctaccacccctgaagaagcctcgagcactgcccaagcacaaaagccttcagtgccccggagcaattttcagggcaccaagaaaagtctcctgatgtctatattagcgctcatcttcatcatgggcaacagcgccaaggaagctctggtctggaaagtgctggggaagttaggaatgcagcctggacgtcagcacagcatctttggagatccgaagaagatcgtcacagaagagtttgtgcgcagagggtacctgatttataaaccggtgccccgtagcagtccggtggagtatgagttcttctgggggccccgagcacacgtggaatcgagcaaactgaaagtcatgcattttgtggcaagggttcgtaaccgatgctctaaagactggccttgtaattatgactgggattcggacgatgatgcagaggttgaggctatcctcaattcaggtgctaggggttattccgccccttaagtagatctgaggcagacccttgggggtgtaaaagagagtcacaggtaccccaaggagtagatgccagggtcctaagttgaaaatgatgtcgattgggggcgggggacactgtatttgatatttgtgatcagtgatcattgttcaactgcgaaatagagtgtttgcttttgataatggaaaattgtattcgttttaaaattccgtttgttgagaataacaatatgtttaaaaatataattgaacaaatttttttctttgtttcctgtcattgacatttagtataacagttttgctaacgttctaaaatgaagtcgttccatcataatctatgatcttgtacagcacttatagaaataagctgttcttttgaagttgaaatacccagtaaaatgttgaagaaggatggaggatttcttcatatctgacgtttctgaaaccctttgtgtctgctgttgtgtgaagattgacatttaccatgattttccttagttacttgacgtcttgtatctctttttattttcggattgcttatca

SEQ ID NO: 368 - DNA, 436 bp, Homo sapiens
  3' terminal sequence. ets variant gene 5 (ets-related molecule) (ETV5) gene.
  modified_base (263): a, t, c or g
  modified_base (406): a, t, c or g
cgtttttttgctttaaataccaaaactacaaaaatcagtttataaactgtttttccaaaacaaccaccaaaacaaaacaatcccccaaatcagggcaaaacaaaatactgtcaaaagtgttaatcgcccttctcctaaaataaaagtcatccacactcagccacgtgattgggaagagaaagggggcttgctctacttggcgaccacatggccgggtggttcccaagagtagccatggtttatgattttgagaaccacggagngcgaaacagctgttctgactgcccccctttttctagacaaggggtaatatttcagattcagctagaagagctttccaatgtttaagatgtatttttaacccttaatggtttgagcctccccaacttagcctacttacttttcnaagggtttgtgatttttcaacaaattgtgc

SEQ ID NO: 369 - DNA, 414 bp, Homo sapiens
  5' terminal sequence. ets variant gene 5 (ets-related molecule) (ETV5) gene.
  modified_base (344): a, t, c or g
  modified_base (387): a, t, c or g
  modified_base (396): a, t, c or g
ggttgctcggcgctggggcatccagaagaaccggccagccatgaactatgacaagctgagccgctctctccgctattactatgaaaagggcatcatgcagaaggtggctggagagcgatacgtctacaaatttgtctgtgacccagatgccctcttctccatggctttcccggataaccagcgtccgttcctgaaggcagagtccgagtgccacctcagcgaggaggacaccctgccgctgacccactttgaagacagccccgcttacctcctggacatggaccgctgcagcagcctcccctatgccgaaggtttgcttactaagtttctgagtggcggagtgnccaaaccctaggagctagcagttcccattcagggcaaacaagnggcagtggngtttgttttgtgtttttt

SEQ ID NO: 370 - DNA, 249 bp, Homo sapiens
  5' terminal sequence. cd69 antigen (p60, early t-cell activation antigen) (CD69) gene.
  modified_base (244): a, t, c or g
ataataaggaaacgtgttcacttattgactattatagaatggaactcatggaaatctgtgtcagtggatgctgctctgtggtccgaagtcttccatagagactttgtgaaaaaaaattttatagtgtcttgggaattttcttccaaacagaactatggaaaaaaaggaagaaattccaggaaaatctgcactgtgggcttttattgccatgagctagaagcatcacagggtgaccaataacccngacgc

SEQ ID NO: 371 - DNA, 1702 bp, Homo sapiens
  cd69 antigen (p60, early t-cell activation antigen) (CD69) gene.
agactcaacaagagctccagcaaagactttcactgtagcttgacttgacctgagattaactagggaatcttgagaataaagatgagctctgaaaattgtttcgtagcagagaacagctctttgcatccggagagtggacaagaaaatgatgccaccagtccccatttctcaacacgtcatgaagggtccttccaagttcctgtcctgtgtgctgtaatgaatgtggtcttcatcaccattttaatcatagctctcattgccttatcagtgggccaatacaattgtccaggccaatacacattctcaatgccatcagacagccatgtttcttcatgctctgaggactgggttggctaccagaggaaatgctactttatttctactgtgaagaggagctggacttcagcccaaaatgcttgttctgaacatggtgctactcttgctgtcattgattctgaaaaggacatgaactttctaaaacgatacgcaggtagagaggaacactgggttggactgaaaaaggaacctggtcacccatggaagtggtcaaatggcaaagaatttaacaactggttcaacgttacagggtctgacaagtgtgtttttctgaaaaacacagaggtcagcagcatggaatgtgagaagaatttatactggatatgtaacaaaccttacaaataataaggaaacatgttcacttattgactattatagaatggaactcaaggaaatctgtgtcagtggatgctgctctgtggtccgaagtcttccatagagactttgtgaaaaaaaattttatagtgtcttgggaattttcttccaaacagaactatggaaaaaaaggaagaaattccaggaaaatctgcactgtgggcttttattgccatgagctagaagcatcacaggttgaccaataaccatgcccaagaatgagaagaatgactatgcaacctttggatgcactttatattattttgaatccagaaataatgaaataactaggcgtggacttactatttattgctgaatgactaccaacagtgagagcccttcatgcatttgcactactggaaggagttagatgttggtactagatactgaatgtaaacaaaggaattatggctggtaacataggtttttagtctaattgaatcccttaaactcagggagcatttataaatggacaaatgcttatgaaactaagatttgtaatatttctctctttttagagaaatttgccaatttactttgttatttttccccaaaaagaatgggatgatcgtgtatttatttttttacttcctcagctgtagacaggtccttttcgatggtacatatttctttgcctttataatcttttatacagtgtcttacagagaaaagacataagcaaagactatgaggaatatttgcaagacatagaatagtgttggaaaatgtgcaatatgtgatgtggcaaatctctattaggaaatattctgtaatcttcagacctagaataatactagtcttataataggtttgtgactttcctaaatcaattctattacgtgcaatacttcaatacttcatttaaaatatttttatgtgcaataaaatgtatttgtttgtattttgtgttcagtacaattataagctgtttttatatatgtgaaataaaagtagaataaacacaaaaaaaaaaaaaaaaaaaaaaaaaaaa

SEQ ID NO: 372 - DNA, 585 bp, Homo sapiens
  3' terminal sequence. oncogene tc21 (TC21) gene.
  modified_base (402): a, t, c or g
  modified_base (428): a, t, c or g
  modified_base (464): a, t, c or g
  modified_base (529): a, t, c or g
  modified_base (562): a, t, c or g
  modified_base (569): a, t, c or g
  modified_base (584): a, t, c or g
gtaggcagtatgattccaaaagttaaaaattatttcacaacctgtagcttcagcttggcaaacagcttagattccaaaactgattcatctctattaaaatgtaagcacttaaaaaaagagcatgtctgtgtatatagacatatattttaaaggaatcagataatctttgaagcagccttagtgtttcctttaaatttgtctggaaatgaccattgtattagcttcacagaaaggactagccagcttcttcgtctaaggctaacatggtgatcatttgtctaaggctagaaaggtaccaacaagatgtaaactgaggagagaaagagaagatgagggcttttcctggccgttggtagctaaaactgaagggattctagaaaatgacacaatggcagcctttcntgtctttttctttccgtgttggttcnggtgaaggaggacattcctggccctggaaatttccnggataacccggacaagttcatgggaaagcttgatctacattcatcctaatccttgccggatgccnccatgtatgttacctaagctgccggcaacggtngcctctnccggggtaccggccng

SEQ ID NO: 373 - DNA, 451 bp, Homo sapiens
  5' terminal sequence. oncogene tc21 (TC21) gene.
  modified_base (355): a, t, c or g
  modified_base (395): a, t, c or g
gattcttacacaaagcagtgtgtgatagatgacagagcagcccggctagatattttggatacagcaggacaagaagagtttggagccatgagagaacagtatatgaggactggcgaaggcttcctgttggtcttttcagtcacagatagaggcagttttgaagaaatctataagtttcaaagacagattctcagagtaaaggatcgtgatgagttcccaatgattttaattggtaataaagcagatctggatcatcaaagacaggtaacacaggaagaaggacaacagttagcacggcagcttaaggtaacatacatggaggcatcagcaaagattaggatgaatgtagatcaantttccatgaacttgtccgggttatcaggaaatttcaagancaggaatgtcctcttcacagaccacacggaaagaaaagccagaaagctgcattgtg

SEQ ID NO: 374 - DNA, 425 bp, Homo sapiens
  3' terminal sequence. cd44 antigen (homing function and indian blood group system) (CD44) gene.
gaagatcgaagaagtacagatatttattatgaatcagtttaaacccttttgtgcctctgacaaagtaactttaaaaaattatactgatcaaaggactgatccagggtttaatatttcaaaaacacagataaatagtttactacagataaatagcttcaccctttggtgtcctcccagaagcatctgaaaaatttctagagggggtctgttgaagatgtgtaactagtacaccccaacccccaacctcagtggaaagcaatgcccagggattaggctatggaagggcaaaatggacccattcaaatttcctcccagggaccaggccctattaaccctgggaaatgtccttagctggtgggggaaaggttggcgattcaggaatacatatgtgtagtttttgttagaagccatccatagcacacccg

SEQ ID NO: 375 - DNA, 478 bp, Homo sapiens
  5' terminal sequence. cd44 antigen (homing function and indian blood group system) (CD44) gene.
  modified_base (27): a, t, c or g
  modified_base (266): a, t, c or g
  modified_base (447): a, t, c or g
ggcgttccagttcccacttggaggccnttcatccctcgggtgtgctatggatggcttctaacaaaaactacacatatgtattcctgatcgccaacctttcccccaccagctaaggacatttcccagggttaatagggcctggtccctgggaggaaatttgaatgggtccattttgcccttccatagcctaatccctgggcattgctttccactgaggttgggggttggggtgtactagttacacatcttcaacagaccccctctangaaatttttcagatgcttctgggagacacccaaaggggaaagctatttatctgtagtaaactatttatctgtgtttttgaaatattaaaccctggatcagtcctttgatcagtataaattttttaaagttacttttgtcagaggcaccaaagggtttaaactgattcataaataaatatcnggacttcctcgatcttccaaaaaaaaaaaaa

SEQ ID NO: 376 - DNA, 1794 bp, Homo sapiens
  cd44 antigen (homing function and indian blood group system) (CD44) gene.
cccgcgccctccgttcgctccggacaccatggacaagttttggtggcacgcagcctggggactctgcctcgtgccgctgagcctggcgcagatcgatttgaatataacctgccgctttgcaggtgtattccacgtggagaaaaatggtcgctacagcatctctcggacggaggccgctgacctctgcaaggctttcaatagcaccttgcccacaatggcccagatggagaaagctctgagcatcggatttgagacctgcaggtatgggttcatagaagggcatgtggtgattccccggatccaccccaactccatctgtgcagcaaacaacacaggggtgtacatcctcacatacaacacctcccagtatgacacatattgcttcaatgcttcagctccacctgaagaagattgtacatcagtcacagacctgcccaatgcctttgatggaccaattaccataactattgttaaccgtgatggcacccgctatgtccagaaaggagaatacagaacgaatcctgaagacatctaccccagcaaccctactgatgatgacgtgagcagcggctcctccagtgaaaggagcagcacttcaggaggttacatcttttacaccttttctactgtacaccccatcccagacgaagacagtccctggatcaccgacagcacagacagaatccctgctaccagagaccaagacacattccaccccagtggggggtcccataccactcatggatctgaatcagatggacactcacatgggagtcaagaaggtggagcaaacacaacctctggtcctataaggacaccccaaattccagaatggctgatcatcttggcatccctcttggccttggctttgattcttgcagtttgcattgcagtcaacagtcgaagaaggtgtgggcagaagaaaaagctagtgatcaacagtggcaatggagctgtggaggacagaaagccaagtggactcaacggagaggccagcaagtctcaggaaatggtgcatttggtgaacaaggagtcgtcagaaactccagaccagtttatgacagctgatgagacaaggaacctgcagaatgtggacatgaagattggggtgtaacacctacaccattatcttggaaagaaacaaccgttggaaacataaccattacagggagctgggacacttaacagatgcaatgtgctactgattgtttcattgcgaatcttttttagcataaaattttctactctttttgttttttgtgttttgttctttaaagtcaggtccaatttgtaaaaacagcattgctttgtaaattagggcccaattaataatcagcaagaatttgatcgttcagttccacttggaggccttcatcctcgggtgtgctatggatggcttctaacaaaaactacacatatgtattcctgatcgccaacctttcccccaccagctaaggacatttcccagggttaatagggcctggtccctgggaggaaatttgaatgggtccattttgcccttccatagcctaatccctgggcattgctttccactgaggttggggtgtactagttacacatcttcaacagaccccctctagaaatttttcagatgcttctgggagacaccaaagggtgaagctatttatctgtagtaaactatttatctgtgtttttgaaatattaaaccctggatcagtcctttgatcagtataattttttaaagttactttgtcagaggcacaaaagggtttaaactgattcataataaatatctgtacttcttcgatcttc

SEQ ID NO: 377 - DNA, 452 bp, Homo sapiens
  3' terminal sequence. cyclin-dependent kinase inhibitor 3 (cdk2-associated dual specificity phosphatase) (CDKN3) gene.
  modified_base (408): a, t, c or g
  modified_base (440): a, t, c or g
ttttgtcaataaaactttaggaatatctgcacatgtacatttacattcaagttgataacactggtggtttcatttcaatacaaattatgctagagaactgacatttcagacatggtcatatatatgctatttgaattcctttatcttcgatacagatcttgattgtgaatctcttgatgatagatgtgcagctaatttgtcccgaaactcatgaagataattgtattgcttgatggtctgtattgccccggatcctcttaggtctcgcaggctgtctatggcttgctctggtgatattgtgtcagacaggtatagtaggagacaagcagctacaagacaagatctcccaagtcctccatagcagtgtattaagggttttccggtaatttttaaggcaggttgtaagcncttccattatttcacagcagctggccatgtcnggagtcccccca

SEQ ID NO: 378 - DNA, 472 bp, Homo sapiens
  5' terminal sequence. cyclin-dependent kinase inhibitor 3 (cdk2-associated dual specificity phosphatase) (CDKN3) gene.
  modified_base (38): a, t, c or g
  modified_base (51): a, t, c or g
  modified_base (54): a, t, c or g
ggcacgagcggcaactggtctcgacgtggggcggccangactgaagcccangtntcaatacaaacaagtgagtttgactcatcagatgaagagcctattgaagatgaacagactccaattcatatatcatggctatctttgtcacgagtgaattgttctcagtttctcggtttatgtgctcttccaggttgtaaatttaaagatgttagaagaaatgtccaaaaagatacagaagaactaaagagctgtggtatacaacgacatatttgttttctgcaccagaggggaactgtcaaaatatagagtcccaaaccttctggatctctaccagcaatgtggaattatcacccatcatcatccaatccgcagatggagggactcctgacatagccagctgctgtgaaataatggaagagcttacaacctgccttaaaaattaccgaaaaaccttaatacactgctatggaggact

SEQ ID NO: 379 - DNA, 639 bp, Homo sapiens
  cyclin-dependent kinase inhibitor 3 (cdk2-associated dual specificity phosphatase) (CDKN3) gene.
atggagccgcccagttcaatacaaacaagtgagtttgactcatcagatgaagagcctattgaagatgaacagactccaattcatatatcatggctatctttgtcacgagtgaattgttctcagtttctcggtttatgtgctcttccaggttgtaaatttaaagatgttagaagaaatgtccaaaaagatacagaagaactaaagagctgtggtatacaagacatatttgttttctgcaccagaggggaactgtcaaaatatagagtcccaaaccttctggatctctaccagcaatgtggaattatcacccatcatcatccaatcgcagatggagggactcctgacatagccagctgctgtgaaataatggaagagcttacaacctgccttaaaaattaccgaaaaaccttaatacactgctatggaggacttgggagatcttgtcttgtagctgcttgtctcctactatacctgtctgacacaatatcaccagagcaagccatagacagcctgcgagacctaagaggatccggggcaatacagaccatcaagcaatacaattatcttcatgagtttcgggacaaattagctgcacatctatcatcaagagattcacaatcaagatctgtatcaagataa

SEQ ID NO: 380 - DNA, 487 bp, Homo sapiens
  5' terminal sequence. max-interacting protein 1 (MXI1) gene.
aagtggcgactggaacagctgcagggtcctcaggagatggaacgaatacgaatggacagaattggatcaactatttcttcagatcgttctgattcagagcgagaggagattgaagtggatgttgaaagcacagagttctcccatggagaagtggacaatataagtaccaccagcatcagtgacattgatgaccacagcagcctgccgagtattgggagtgacgagggtactccagtgccagtgtcaaactttcattcacttcatagaacccagcatgacataacagtgcagggaaaatattcactgggccattcatacaaacaatctcttaaattgggttcatgatgcagtctcctctttaaaacaaaacaaaacaaaacaaactatacttgaacaaaagggtcagaggactgttttaagcaatacttagcaaaagtgggcagctcccaagagacaatttcagatttcatttggaaatcccatttta

SEQ ID NO: 381 - DNA, 2416 bp, Homo sapiens
  max-interacting protein 1 (MXI1) gene.
agattatgatcgcctgaggcccctctcctacccagataccgatgttatactgatgtgtttttcctttttttttttttttttttaagtaattaagggtagttaaattatttaaagtatacaaagtccaaacagccaggggtaaggtctccaagaggccttcccagggtaagggagtgcggagaggccccggtcgccacccgcggtgcccatggagcgggtgaagatgatcaacgtgcagcgtctgctggaggctgccgagtttttggagcgccgggagcgagagtgtgaacatggctacgcctcttcattcccgtccatgccgagcccccgactgcagcattcaaagcccccacggaggttgagccgggcacagaaacacagcagcgggacgagcaacaccagcactgccaacagatctacacacaatgagctggaaaagaatcgacgagctcatctgcgcctttgtttagaacgcttaaaagttctgattccactaggaccagactgcacccggcacacaacacttggtttgctcaacaaagccaaagcacacatcaagaaacttgaagaagctgaaagaaaaagccagcaccagctcgagaatttggaacgagaacagagatttttaaagtggcgactggaacagctgcagggtcctcaggagatggaacgaatacgaatggacagcattggatcaactatttcttcagatcgttctgattcagagcgagaggagattgaagtggatgttgaaagcacagagttctcccatggagaagtggacaatataagtaccaccagcatcagtgacattgatgaccacagcagcctgccgagtattgggagtgacgagggttactccagtgccagtgtcaaactttcattcacttcatagaacccagcatgacataacagtgcagggcaaaatattcactgggccaattcaatacaaacaatctcttaaattgggttcatgatgcagtctcctctttaaaacaaaacaaaacaaaacaaaactatacttgaacaaaagggtcagaggacctgtatttaagcaaatacttagcaaaaagtggggcagagctcccaaggagaacaaatattcagaatattcatattggaaaaatcacaatttttaatggcagcagaaaacttgtgtgaaattttcttgatttgagttgattgagaagaggacattggagatgccatcctctttctcttttctcgtttgctcatactacattgagtagacacatttaaggatggggttatgaacccttcctgagctttatggtcctaaaagcaaaataaaaactattcgaatgaaaagacaagaaaatcaggtattaatcttggatagctaataatgagctattaaaactcagcctgggacagtttatcatgaagcctgtggatgatcaatcctttattattattttttttttttgaaaaaagctcatttcatgctctgcaaaaggagagactcccatgaagccttttgaaagggatcatcatgcagctcaactttctgttggattccatgctaagcaagctaaccttatcctgcattgttagcactaggcacccagctgccacctctccatcctgctgcccttaggccacatgggagcagtccatgcatgacagcctctatcctacaaggcctatgagtatggattgggggggccaaaaggaaaaagctccatgtgcctctttgtctgcgtgggtcagaagagttgtgcacgcagattagcaggccaaggtctgagccacagcagcatttttatttcagattttgataactgtttatatgtgttgaaaaccaaaatgacatctttttaaagcttatccataaaaaaaaatagatgtcttttatagtggaaaaacacatggggaaaaaaatcatctattttgatgcagcatttgataatgataaaacacctcacacctcactctttatagtgcacaaaatgaatgaggtctgggctaggtagaaaaagggtcaatgctatttttgtttttagaatcattaccttttaccagcttttaaccatctgatatctatagtagacacactatcatagttaacatagttaagttcagcacttgtctcattttaatgtaaagatttgcttccattttcctacaggcagtctctctcttcctcacagtcccactgtgcaggtgctattgttactcttacgaatattttcagtaatgttattttcttctaagtgaaatttctagcctgcactttgatgtcatgtgttccctttgtctttcaaactccaaggttcccctgtggccctctcccttaccctgggaaggcctcttggagaccttacccctggctgtttggactttgtatactttaaataatttaactacccttaattacttaaaaaaaaaaaaaaaa

SEQ ID NO: 382 - DNA, 378 bp, Homo sapiens
  3' terminal sequence. homeo box a5 (HOXA5) gene.
  modified_base (329): a, t, c or g
  modified_base (333): a, t, c or g
  modified_base (376): a, t, c or g
ttttttttttttgttatagttacttcaagtaacacagcttgcttcatataaataagttaaaacatctattttttttcaagacaaagccattcaggacaaagagatgaacagaaagcagatctacttatacaggcgctataatggcaataaacaggctcatgattaaaagatgaattagggcaacgagaacagggcttcttcacagaaggaacacaagggagtttcagaaagtcaccttagtactgacactacgcgggatccgctaaatactgctcagtactttaaacgctcagatactcagggacggaaggccctcccttgcccgcggncatnctccatggcttttcagcttattatcttttttccacttcaatcncc

SEQ ID NO: 383 - DNA, 439 bp, Homo sapiens
  5' terminal sequence. homeo box a5 (HOXA5) gene.
  modified_base (17): a, t, c or g
  modified_base (20): a, t, c or g
  modified_base (119): a, t, c or g
  modified_base (199): a, t, c or g
  modified_base (205): a, t, c or g
  modified_base (211): a, t, c or g
  modified_base (248): a, t, c or g
  modified_base (264): a, t, c or g
  modified_base (286): a, t, c or g
  modified_base (310): a, t, c or g
  modified_base (316): a, t, c or g
  modified_base (318): a, t, c or g
  modified_base (330): a, t, c or g
  modified_base (339): a, t, c or g
  modified_base (343): a, t, c or g
  modified_base (357): a, t, c or g
  modified_base (362): a, t, c or g
  modified_base (368): a, t, c or g
  modified_base (369): a, t, c or g
  modified_base (375): a, t, c or g
  modified_base (408): a, t, c or g
  modified_base (425): a, t, c or g
aaatcaagcacacatantanaaaacaaatgagctcttattttgtaaactcattttgcggtcgctatccaaatggcccggactaccagttgcataattatggagatcatagttccgtgancgagcaattcagggactcggcgagcatgcactccggcaggtacggctacggctacaatggcatggatctcagcgtcggcngctcgngctccngcactttggctccggagagcgcgcccgcagctacgtncaagcgccacgcggcncactccaagcccaggtacagcnagccggccacgtccacgcactctncctcancncgatccgctgcnctgctccgncgtnggccccttcgcccnggaancgacannaccaanggcgggaaaaactcccttaaggcaactccagcnggcgcctcgggccgacngccggaagcaccca

SEQ ID NO: 384 - DNA, 813 bp, Homo sapiens
  homeo box a5 (HOXA5) gene.
atgagctcttattttgtaaactcattttgcggtcgctatccaaatggcccggactaccagttgcataattatggagatcacagttccgtgagcgagcaattcagggactcggcgagcatgcactccggcaggtacggctacggctacaatggcatggatctcagcgtcggccgctcgggctccggccactttggctccggagagcgcgcccgcagctacgctgccagcgccagcgcggcgcccgccgagcccaggtacagccagccggccacgtccacgcactctcctcagcccgatccgctgccctgctccgccgtggccccctcgcccggcagcgacacgcaccacggcgggaaaaactccctaagcaactccagcggcgcctcggccgacgccggcagcacccacatcagcagcagagagggggttggcacggcgtccggagccgaggaggacgcccctgccagcagcgagcaggcgagtgcgcagagcgagccgagcccggcgccgcccgcccaaccccagatctacccctggatgcgcaagctgcacataagtcatgacaacataggcggcccggaaggcaaaagggcccggacggcctacacgcgctaccagaccctggagctggagaaggagttccacttcaaccgttacctgacccgcagaaggaggattgaaatagcacatgctctttgcctctccgagagacaaattaaaatctggttccaaaaccggagaatgaagtggaaaaaagataataagctgaaaagcatgagcatggccgcggcaggaggggccttccgtccctga

SEQ ID NO: 385 - DNA, 447 bp, Homo sapiens
  3' terminal sequence. x-box binding protein 1 (XBP1) gene.
  modified_base (404): a, t, c or g
gcattgtaccttttaattgcatgggtagttttaaataaatggagaaagcacctttcagaagctacactagcaggaaaaaattccatcaagcatttacatagtaaatttctataatttcacaaaagattcttgatcttacttgaagtatacatgagggaaagagccccctcagcaggtgttcccgttgcttacagaagcaaactaaaggacctaaaactggaggcaagccaggatgccaaaaagggggaagagaaatgataaagaaccattcataaattccatgtctacttcaagacatttgtctaatgacccttacataataagtattttagggaaaactaccacccttttaagataaaagtacaatcttaaaagctgtagttctcaattatagtaatatttcntacttccagtaatatgtctcaataccttggactgctggatgtc

SEQ ID NO: 386 - DNA, 462 bp, Homo sapiens
  5' terminal sequence. x-box binding protein 1 (XBP1) gene.
  modified_base (452): a, t, c or g
aagaacctgtagaagatgacctcgttccggagctgggtatctcaaatctgctttcatccagccactgcccaaagccatcttcctgcctactggatgcttacagtgactgtggatacgggggttccctttccccattcagtgacatgtcctctctgcttggtgtaaaccattcttgggaggacacttttgccaatgaactctttccccagctgattagtgtctaaggaatgatccaatactgttgcccttttccttgactattacactgcctggaggatagcagagaagcctgtctgtacttcattcaaaaagccaaaatagagagtatacagtcctagagaattcctctatttgttcagatctcatagatgacccccaggtattgtcttttgacatcccaagcagtccaaggtattggagacatattactgggaagtaaagaaatattactnataattggag

SEQ ID NO: 387 - DNA, 1836 bp, Homo sapiens
  x-box binding protein 1 (XBP1) gene.
ggcgctgggcggctgcggcgcgcggtgcgcggtgcgtagtctggagctatggtggtggtggcagccgcgccgaacccggccgacgggacccctaaagttctgcttctgtcggggcagcccgcctccgccgccggagccccggccggccaggccctgccgctcatggtgccagcccagagaggggccagcccggaggcagcgagcggggggctgccccaggcgcgcaagcgacagcgcctcacgcacctgagccccgaggagaaggcgctgaggaggaaactgaaaaacagagtagcagctcagactgccagagatcgaaagaaggctcgaatgagtgagctggaacagcaagtggtagatttagaagaagagaaccaaaaacttttgctagaaaatcagcttttacgagagaaaactcatggccttgtagttgagaaccaggagttaagacagcgcttggggatggatgccctggttgctgaagaggaggcggaagccaaggggaatgaagtgaggccagtggccgggtctgctgagtccgcagcactcagactacgtgcacctctgcagcaggtgcaggcccagttgtcacccctccagaacatctccccatggattctggcggtattgactcttcagattcagagtctgatatcctgttgggcattctggacaacttggacccagtcatgttcttcaaatgcccttccccagagcctgccagcctggaggagctcccagaggtctacccagaaggacccagttccttaccagcctccctttctctgtcagtggggacgtcatcagccaagctggaagccattaatgaactaattcgttttgaccacatatataccaagcccctagtcttagagataccctctgagacagagagccaagctaatgtggtagtgaaaatcgaggaagcacctctcagcccctcagagaatgatcaccctgaattcattgtctcagtgaaggaagaacctgtagaagatgacctcgttccggagctgggtatctcaaatctgctttcatccagccactgcccaaagccatcttcctgcctactggatgcttacagtgactgtggatacgggggttccctttccccattcagtgacatgtcctctctgcttggtgtaaaccattcttgggaggacacttttgccaatgaactctttccccagctgattagtgtctaaggaatgatccaatactgttgcccttttccttgactattacactgcctggaggatagcagagaagcctgtctgtacttcattcaaaaagccaaaatagagagtatacagtcctagagaattcctctatttgttcagatctcatagatgacccccaggtattgtcttttgacatccagcagtccaaggtattgagacatattactggaagtaagaaatattactataattgagaactacagcttttaagattgtacttttatcttaaaagggtggtagttttccctaaaatacttattatgtaagggtcattagacaaatgtcttgaagtagacatggaatttatgaatggttctttatcatttctcttccccctttttggcatcctggcttgcctccagttttaggtcctttagtttgcttctgtaagcaacgggaacacctgctgagggggctctttccctcatgtatacttcaagtaagatcaagaatcttttgtgaaattatagaaatttactatgtaaatgcttgatggaattttttcctgctagtgtagcttctgaaaggtgctttctccatttatttaaaactacccatgcaattaaaaggtacaatgcaaaaaaaaaaaaaaaaa

SEQ ID NO: 388 - DNA, 433 bp, Homo sapiens
  3' terminal sequence. tumor necrosis factor, alpha-induced protein 3 (TNFAIP3) gene.
  modified_base (199): a, t, c or g
  modified_base (253): a, t, c or g
  modified_base (267): a, t, c or g
  modified_base (379): a, t, c or g
  modified_base (395): a, t, c or g
  modified_base (413): a, t, c or g
tttttcttaaataatttattttttaatgttgactcttgtgaaaagttacatttatttagaaaaacttgaagaaatccaacaaagaataggtggctttctattagggacaattaaatgtgcaaatttcaaatactttttataataagtataaataattactttttttcacattaagaatggaaataatgatcaacacaanatattaagatatcaactttaagagaattagatgaaaacactgaagtttatttgngtatccttggaaangaattataaagattcgtctgggaaaaacttagggggctctaaggggaaagttgtgcctaatagtatgagtaaaggctgtgtagagttatggatcacaaatattttcaggccntaagtacagacccccnaaatggcagcctttatcnccggggaaaatgcatttccc

SEQ ID NO: 389 - DNA, 206 bp, Homo sapiens
  5' terminal sequence. tumor necrosis factor, alpha-induced protein 3 (TNFAIP3) gene.
  modified_base (197): a, t, c or g
  modified_base (199): a, t, c or g
  modified_base (200): a, t, c or g
ctcaaccagctgcctttttaaagggagctctagtcctttttgtgtaattcactttatttattttattacaaacttcaagattatttaagtgaagatatttcttcagctctggggaaaatgccacagtgttctcctgagagaacatccttgctttgagtcaggctgtgggcaagttcctgaccacagggagtaaattngnncctctt

SEQ ID NO: 390 - DNA, 4426 bp, Homo sapiens
  tumor necrosis factor, alpha-induced protein 3 (TNFAIP3) gene.
tgccttgaccaggacttgggactttgcgaaaggatcgcggggcccggagaggtgttggagagcacaatggctgaacaagtccttcctcaggctttgtatttgagcaatatgcggaaagctgtgaagatacgggagagaactccagaagacatttttaaacctactaatgggatcattcatcattttaaaaccatgcaccgatacacactggaaatgttcagaacttgccagttttgtcctcagtttcgggagatcatccacaaagccctcatcgacagaaacatccaggccaccctggaaagccagaagaaactcaactggtgtcgagaagtccggaagcttgtggcgctgaaaacgaacggtgacggcaattgcctcatgcatgccacttctcagtacatgtggggcgttcaggacacagacttggtactgaggaaggcgctgttcagcacgctcaaggaaacagacacacgcaactttaaattccgctggcaactggagtctctcaaatctcaggaatttgttgaaacggggctttgctatgatactcggaactggaatgatgaatgggacaatcttatcaaaatggcttccacagacacacccatggcccgaagtggacttcagtacaactcactggaagaaatacacatatttgtcctttgcaacatcctcagaaggccaatcattgtcatttcagacaaaatgctaagaagtttggaatcaggttccaatttcgcccctttgaaagtgggtggaatttacttgcctctccactggcctgcccaggaatgctacagataccccattgttctcggctatgacagccatcattttgtacccttggtgaccctgaaggacagtgggcctgaaatccgagctgttccacttgttaacagagaccggggaagatttgaagacttaaaagttcactttttgacagatcctgaaaatgagatgaaggagaagctcttaaaagagtacttaatggtgatagaaatccccgtccaaggctgggaccatggcacaactcatctcatcaatgccgcaaagttggatgaagctaacttaccaaaagaaatcaatctggtagatgattactttgaacttgttcagcatgagtacaagaaatggcaggaaaacagcgagcaggggaggagagaggggcacgcccagaatcccatggaaccttccgtgccccagctttctctcatggatgtaaaatgtgaaacgcccaactgccccttcttcatgtctgtgaacacccagcctttatgccatgagtgctcagagaggcggcaaaagaatcaaaacaaactcccaaagctgaactccaagccgggccctgaggggctccctggcatggcgctcggggcctctcggggagaagcctatgagcccttggcgtggaaccctgaggagtccactggggggcctcattcggccccaccgacagcacccagcccttttctgttcagtgagaccactgccatgaagtgcaggagccccggctgccccttcacactgaatgtgcagcacaacggattttgtgaacgttgccacaacgcccggcaacttcacgccagccacgccccagaccacacaaggcacttggatcccgggaagtgccaagcctgcctccaggatgttaccaggacatttaatgggatctgcagtacttgcttcaaaaggactacagcagaggcctcctccagcctcagcaccagcctccctccttcctgtcaccagcgttccaagtcagatccctcgcggctcgtccggagcccctccccgcattcttgccacagagctggaaacgacgcccctgctggctgcctgtctcaagctgcacggactcctggggacaggacggggacgagcaagtgcagaaaagccggctgcgtgtattttgggactccagaaaacaagggcttttgcacactgtgtttcatcgagtacagagaaaacaaacattttgctgctgcctcagggaaagtcagtcccacagcgtccaggttccagaacaccattccgtgcctggggagggaatgcggcacccttggaagcaccatgtttgaaggatactgccagaagtgtttcattgaagctcagaatcagagatttcatgaggccaaaaggacagaagagcaactgagatcgagccagcgcagagatgtgcctcgaaccacacaaagcacctcaaggcccaagtgcgcccgggcctcctgcaagaacatcctggcctgccgcagcgaggagctctgcatggagtgtcagcatcccaaccagaggatgggccctggggcccaccggggtgagcctgcccccgaagacccccccaagcagcgttgccgggcccccgcctgtgatcattttggcaatgccaagtgcaacggctactgcaacgaatgctttcagttcaagcagatgtatggctaaccggaaacaggtgggtcacctcctgcaagaagtggggcctcgagctgtcagtcatcatggtgctatcctctgaacccctcagctgccactgcaacagtgggcttaagggtgtctgagcaggagaggaaagataagctcttcgtggtgcccacgatgctcaggtttggtaacccgggagtgttcccaggtggccttagaaagcaaagcttgtaactggcaagggatgatgtcagattcagcccaaggttcctcctctcctaccaagcaggaggccaggaacttctttggacttggaaggtgtgcggggactggccgaggcccctgcaccctgcgcatcaggactgcttcatcgtcttggctgagaaagggaaaagacacacaagtcgcgtgggttggagaagccagagccattccacctcccctcccccagcatctctcagagatgtgaagccagatcctcatggcagcgaggccctctgcaagaagctcaaggaagctcagggaaaatggacgtattcagagagtgtttgtagttcatggtttttccctacctgcccggttcctttcctgaggacccggcagaaatgcagaaccatccatggactgtgattctgaggctgctgagactgaacatgttcacattgacagaaaaacaagctgctctttataatatgcaccttttaaaaaattagaatattttactgggaagacgtgtaactctttgggttattactgtctttacttctaaagaagttagcttgaactgaggagtaaaagtgtgtacatatataatatacccttacattatgtatgagggatttttttaaattatattgaaatgctgccctagaagtacaataggaaggctaaataataataacctgttttctggttgttgttggggcatgagcttgtgtatacactgcttgcataaactcaaccagctgcctttttaaagggagctctagtcctttttgtgtaattcactttatttattttattacaaacttcaagattatttaagtgaagatatttcttcagctctggggaaaatgccacagtgttctcctgagagaacatccttgctttgagtcaggctgtgggcaagttcctgaccacagggagtaaattggcctctttgatacacttttgcttgcctccccaggaaagaaggaattgcatccaaggtatacatacatattcatcgatgtttcgtgcttctccttatgaaactccagctatgtaataaaaaactatactctgtgttctgttaatgcctctgagtgtcctacctccttggagatgagatagggaaggagcagggatgagactggcaatggtcacagggaaagatgtggccttttgtgatggttttattttctgttaacactgtgtcctgggggggctgggaagtcccctgcatcccatggtaccctggtattgggacagcaaaagccagtaaccatgagtatgaggaaatctctttctgttgctggcttacagtttctctgtgtgctttgtggttgctgtcatatttgctctagaagaaaaaaaaaaaaggaggggaaatgcattttccccagagataaaggctgccattttgggggtctgtacttatggcctgaaaatatttgtgatccataactctacacagcctttactcatactattaggcacactttccccttagagccccctaagtttttcccagacgaatctttataatttcctttccaaagataccaaataaacttcagtgttttcatctaattctcttaaagttgatatcttaatattttgtgttgatcattatttccattcttaatgtgaaaaaaagtaattatttatacttattataaaaagtatttgaaatttgcacatttaattgtccctaatagaaagccacctattctttgttggatttcttcaagtttttctaaataaatgtaacttttcacaagagtcaacattaaaaaataaattattt

SEQ ID NO: 391 - DNA, 440 bp, Homo sapiens
  3' terminal sequence. serum response factor (c-fos serum response element-binding transcription factor) (SRF) gene.
  modified_base (338): a, t, c or g
  modified_base (398): a, t, c or g
tttttttgtgcacaaaaatgatacatttattgaaagagtattttttttttaatacaaaagaaagctctgtacataggactgtgaccatgtccactattcctgggtcagcatcccaggggaagtagaaaccactgacatacacactcacattcaagcacacacactcactcaggcgcacacacccacacacacataccccagagccaccgaggaagggaaacaccaagggtcgctgcacataaaaatatcacctcaactcatccctgacacacgcatgtcctcccaaggccacgctcacacaacacacattataagcactttgcctgattcactcactngggtctgtcttttgtgggaaggagaggaagaattcatcaaaggtctcctccccatgggtngggggagtggggagtgagtgagtgatggtggagtgaaacaag

SEQ ID NO: 392 - DNA, 471 bp, Homo sapiens
  5' terminal sequence. serum response factor (c-fos serum response element-binding transcription factor) (SRF) gene.
  modified_base (215): a, t, c or g
  modified_base (234): a, t, c or g
  modified_base (237): a, t, c or g
aattcggcacgaaggcaggaatgggggtcagaagaagtgggagcagcttcttgggctgagtgcagcaaaggggagccagaaatgggcagttctcccagggagtgagcagctactgtaacttttttaaattaagacaaaaagccttgaagaaaatgactttatttttctaagtgtaacctcagtatttatgtaatttgtacaggggccatgccacnccccctcctccccctttgngtnagaccttgagggtgggccagcataggggggagggtcttttaccctgtgtcagagcctaccttcaccacctatatccagaaggggagctttttcagaaacagggcagcagtggggtgaaattttcttaacccctaagactgccttcagtaaggaacaagctggcttctgtgattaggtgaagggatgggggaagattttaatgcacagcctagttatcaaggggatgatttgccg

SEQ ID NO: 393 - DNA, 4201 bp, Homo sapiens
  serum response factor (c-fos serum response element-binding transcription factor) (SRF) gene.
ggtcgggggatccctccgccgccagcgcgtggtcccggccccctccacccgccgtctcggccgcggccagcagcccctgccccccgggggacgctgacggccgcccggcgcgccgccctagcagacggacagggggcgctgcgcgcggcctggggcaacccgggccacaggggcaggaaagtgagggcccaggtcggcccgggcgtgcaggggccccgggttcgcagcggcggccgcggcagcgatagcggcactagcagcagcgggagtgccgggttgagccgggaagccgatggcggcggctgcggcggctccgattcctcgctgactgcccgtccgccctcctgcatcgagcgccatgttaccgacccaagctggggccgcggcggctctgggccggggctcggccctggggggcagcctgaaccggaccccgacggggcggccgggcggcggcggcgggacacgcggggctaacgggggccgggtccccgggaatggcgcggggctcgggcccggccgcctggagcgggaggctgcggcagcggcggcaaccaccccggcgcccaccgcgggggccctctacagcggcagcgagggcgactcggagtcgggcgaggaggaggagctgggcgccgagcggcgcggcctgaagcggagcctgagcgagatggagatcggtatggtggtcggtgggcccgaggcgtcggcagcggccaccgggggctacgggccggtgagcggcgcggtgagcggggccaagccgggtaagaagacccggggccgcgtgaagatcaagatggagttcatcgacaacaagctgcggcgctacacgaccttcagcaagaggaagacgggcatcatgaagaaggcctatgagctgtccacgctgacagggacacaggtgctgttgctggtggccagtgagacaggccatgtgtatacctttgccacccgaaaactgcagcccatgatcaccagtgagaccggcaaggcactgattcagacctgcctcaactcgccagactctccaccccgttcagaccccacaacagaccagagaatgagtgccactggctttgaagagacagatctcacctaccaggtgtcggagtctgacagcagtggggagaccaaggacacactgaagccggcgttcacagtcaccaacctgccgggtacaacctccaccatccaaacagcacctagcacctctaccaccatgcaagtcagcagcggcccctcctttcccatcaccaactacctggcaccagtgtctgctagtgtcagccccagtgctgtcagcagtgccaatgggactgtgctgaagagtacaggcagcggccctgtctcctctgggggccttatgcagctgcctaccagcttcaccctcatgcctggtggggcagtggcccagcaggtcccagtgcaggccattcaagtgcaccaggccccacagcaagcgtctccctcccgtgacagcagcacagacctcacgcagacctcctccagcgggacagtgacgctgcccgccaccatcatgacgtcatccgtgcccacaactgtgggtggccacatgatgtaccctagcccgcatgcggtgatgtatgcccccacctcgggcctgggtgatggcagcctcaccgtgctgaatgccttctcccaggcaccatccaccatgcaggtgtcacacagccaggtccaggagccaggtggcgtcccccaggtgttcctgacagcatcatctgggacagtgcagatccctgtttcagcagttcagctccaccagatggctgtgatagggcagcaggccgggagcagcagcaacctcaccgagctacaggtggtgaacctggacaccgcccacagcaccaagagtgaatgatccgcccgccgccctggacagatggcccaagggatggcaccacttatttattgttgccttttcacgttttctttacacacacgttgacgggccgcaggagggaggcggggaggaggaacgggcagccacaggactgagccctctcactccagccaaagaaatgggcctgcctgcctccacccgtcctccctcagcctccccttcttcccgccccacctcccatttctgttgctggaggggctgtcctccttcctgggaccccctcgccagcttggctcgatgtttgccatgagtattagcttacccaatgggaccgtgccccacctccccacacacaggccttctgtggggctgggcaccgtgtcctcctctgaggaagcagttggggccctcttgccagcctccttgctgaccccaggtcagccctgtgtctgtcacaggctgggtcaaaagagccctggctctgcccctcagggggccagctggggagatgggggcttcttcctcacactgctgtcctctcccccttcagctcctgagtagctgggcctgtgcactgggcaggttcctggggccgcctgccctgccttgccgctccccttggacctccaggggctcctgggttggagggaaccaccagcgttcccttctcccccttgtcttcccccctctcctcccagctgctttacttaaagttgattttgaactttttatttgaggagacgaagtgaaaacaaatctataaatatatatttttaaaatatttaacttttttttatggcgtttttctcgtccccctccctgcccaaactccccttccctggggagccctcaggctccccagaactggctgggcccctggggacagagccaccccatgagctcggggtccaccagtgtgtgggggagattctgggtttgcccagtcctggattgtttccaggagaaagccgggggaggggccctcaggccattccccaacggggtggggagggtgacccacagctctgggcctctttttgccctttagggctgttgctagggagagggaagagggagaccaaatgtcggggttggggtgggagggcgtcaggcagaggcaactgacttcatttgtgccacacgcatgggcattgcagccttgcgctgtcccaggcatgcagctgcctggggcccaagttgcagtgagcagggtggggtctgggagggggtgagaggcaggaatgggggtcagaagaagtgggagcagcttcttgggctgagtgcagccaaaggggagccagaaatgggcagttctcccagggagtgagcagctactgtaacttttttaaattaagacaaaaagccttgaagaaaatgactttatttttctaagtgtaacctcagtatttatgtaatttgtacaggggccatgccccacccccctcctccccctttggggtagaccttgagggtgggccagcataggggggagggtcttttaccctgtgtcagagcctaccttcaccacctatatccagaaggggagctttttcagaaacagggcagcagtggggtgaaattttcttaacccctaagactgccttcagtaggaacaagctggcttctgtgattaggtgaagggatgggggaagattttatgcacagcctagttatcaaggggatgatttgccgacatgtttgagaaccccctaacctctaaccctcattgctgtcttgccccagtttggggtgccaagatggaagtcacctttctgggctttctcctggagactagctggggcttatgggtggctttcaaggctggggcatggcaaatcaggggccagagagcaggggagcttgggactcaggtctgtaactgcccagccccttttctctgctcttgtttcactccaccatcactcactcactccccactcccccacccatggggaggagacctttgatgaattcttcctctccttcccacaaaagacagacccagtgagtgaatcaggcaaagtgcttataatgtgtgttgtgtgagcgtggccttgggaggacatgcgtgtgtcagggatgagttgaggtgatatttttatgtgcagcgacccttggtgtttcccttcctcggtggctctggggtatgtgtgtgtgggtgtgtgcgcctgagtgagtgtgtgtgcttgaatgtgagtgtgtatgtcagtggtttctacttcccctgggatgctgacccaggaatagtggacatggtcacagtcctatgtacagagctttcttttgtattaaaaaaaaatactctttcaataaatgtatcatttttgtgcacag

SEQ ID NO: 394 - DNA, 563 bp, Homo sapiens
  3' terminal sequence. sry (sex determining region y)-box 9 (campomelic dysplasia, autosomal sex-reversal) (SOX9) gene.
  modified_base (451): a, t, c or g
  modified_base (491): a, t, c or g
  modified_base (505): a, t, c or g
  modified_base (511): a, t, c or g
  modified_base (518): a, t, c or g
  modified_base (532): a, t, c or g
  modified_base (545): a, t, c or g
  modified_base (555): a, t, c or g
tttttaatgcaatgtatatttattgtaaacaataatatacaaaaaaaaaaaagagaaagaaaaagggaaaggtaagtttcacggagagaacaaaaggtttggggctgggagggaaacaagtgaaacaaacaaaacacgaacacaaaccaaagcttttacctaaagacaaaatatgatttaaatgccaggtttcttaagttacagaagtatctttttaaaaagatctgcttttatacagaaattgaaggatgccatattatgagtgctttaagattttattctactgacttctaaaactgttaatatatctttttttaaataaaaaaaaaagtttgctgtcttttttaaaaagcaatcctcaaactctctagccacagcagtaattaagattaaggtctgtcagtgggctgatcccctccaggtagcctccctcactccaagagaagatgcngagaaatatgggatggacacatgcctgcatgtttttgtgnccaaacacacacanacccanacacacncacaatataaggcngccccaaggtctntggccgaaancctggcaa

SEQ ID NO: 395 - DNA, 3936 bp, Homo sapiens
  sry (sex determining region y)-box 9 (campomelic dysplasia, autosomal sex-reversal) (SOX9) gene.
ggagagccgaaagcggagctcgaaactgactggaaacttcagtggcgcggagactcgccagtttcaaccccggaaacttttctttgcaggaggagaagagaaggggtgcaagcgcccccacttttgctctttttcctcccctcctcctcctctccaattcgcctccccccacttggagcgggcagctgtgaactggccaccccgcgccttcctaagtgctcgccgcggtagccggccgacgcgccagcttccccgggagccgcttgctccgcatccgggcagccgaggggagaggagcccgcgcctcgagtccccgagccgccgcggcttctcgcctttcccggccaccagccccctgccccgggcccgcgtatgaatctcctggaccccttcatgaagatgaccgacgagcaggagaagggcctgtccggcgcccccagccccaccatgtccgaggactccgcgggctcgccctgcccgtcgggctccggctcggacaccgagaacacgcggccccaggagaacacgttccccaagggcgagcccgatctgaagaaggagagcgaggaggacaagttccccgtgtgcatccgcgaggcggtcagccaggtgctcaaaggctacgactggacgctggtgcccatgccggtgcgcgtcaacggctccagcaagaacaagccgcacgtcaagcggcccatgaacgccttcatggtgtgggcgcaggcggcgcgcaggaagctcgcggaccagtacccgcacttgcacaacgccgagctcagcaagacgctgggcaagctctggagacttctgaacgagagcgagaagcggcccttcgtggaggaggcggagcggctgcgcgtgcagcacaagaaggaccacccggattacaagtaccagccgcggcggaggaagtcggtgaagaacgggcaggcggaggcagaggaggccacggagcagacgcacatctcccccaacgccatcttcaaggcgctgcaggccgactcgccacactcctcctccggcatgagcgaggtgcactcccccggcgagcactcggggcaatcccagggcccaccgaccccacccaccacccccaaaaccgacgtgcagccgggcaaggctgacctgaagcgagaggggcgccccttgccagaggggggcagacagccccctatcgacttccgcgacgtggacatcggcgagctgagcagcgacgtcatctccaacatcgagaccttcgatgtcaacgagtttgaccagtacctgccgcccaacggccacccgggggtgccggccacgcacggccaggtcacctacacgggcagctacggcatcagcagcaccgcggccaccccggcgagcgcgggccacgtgtggatgtccaagcagcaggcgccgccgccacccccgcagcagcccccacaggccccgccggccccgcaggcgcccccgcagccgcaggcggcgcccccacagcagccggcggcacccccgcagcagccacaggcgcacacgctgaccacgctgagcagcgagccgggccagtcccagcgaacgcacatcaagacggagcagctgagccccagccactacagcgagcagcagcagcactcgccccaacagatcgcctacagccccttcaacctcccacactacagcccctcctacccgcccatcacccgctcacagtacgactacaccgaccaccagaactccagctcctactacagccacgcggcaggccagggcaccggcctctactccaccttcacctacatgaaccccgctcagcgccccatgtacacccccatcgccgacacctctggggtcccttccatcccgcagacccacagcccccagcactgggaacaacccgtctacacacagctcactcgaccttgaggaggcctcccacgaagggcgacgatggccgagatgatcctaaaaataaccgaagaaagagaggaccaaccagaattccctttggacatttgtgtttttttgtttttttattttgttttgttttttcttcttcttcttcttccttaaagacatttaagctaaaggcaactcgtacccaaatttccaagacacaaacatgacctatccaagcgcattacccacttgtggccaatcagtggccaggccaaccttggctaaatggagcagcgaaatcaacgagaaactggactttttaaaccctcttcagagcaagcgtggaggatgatggagaatcgtgtgatcagtgtgctaaatctctctgcctgtttggactttgtaattatttttttagcagtaattaaagaaaaaagtcctctgtgaggaatattctctattttaaatatttttagtatgtactgtgtatgattcattaccattttgaggggatttatacatatttttagataaaattaaatgctcttatttttccaacagctaaactactcttagttgaacagtgtgccctagcttttcttgcaaccagagtatttttgtacagatttgctttctcttacaaaaagaaaaaaaaaatcctgttgtattaacatttaaaaacagaattgtgttatgtgatcagttttgggggttaactttgcttaattcctcaggctttgcgatttaaggaggagctgccttaaaaaaaaataaaggccttattttgcaattatgggagtaaacaatagtctagagaagcatttggtaagctttatgatatatatattttttaaagaagagaaaaacaccttgagccttaaaacggtgctgctgggaaacatttgcactcttttagtgcatttcctcctgcctttgcttgttcactgcagtcttaagaaagaggtaaaaggcaagcaaaggagatgaaatctgttctgggaatgtttcagcagccaataagtgcccgagcacactgcccccggttgcctgcctgggccccatgtggaaggcagatgcctgctcgctctgtcacctgtgcctctcagaacaccagcagttaaccttcaagacattccacttgctaaaattatttattttgtaaggagaggttttaattaaaacaaaaaaaaattcttttttttttttttttttccaattttaccttctttaaaataggttgttggagctttcctcaaagggtatggtcatctgttgttaaattatgttcttaactgtaaccagtttttttttatttatctctttaatcttttttattattaaaagcaagtttctttgtattcctcaccctagatttgtataaatgcctttttgtccatcccttttttctttgttgtttttgttgaaaacaaactggaaacttgtttctttttttgtataaatgagagattgcaaatgtagtgtatcactgagtcatttgcagtgttttctgccacagacctttgggctgccttatattgtgtgtgtgtgtgggtgtgtgtgtgttttgacacaaaaacaatgcaagcatgtgtcatccatatttctctacatcttctcttggagtgagggaggctacctggaggggatcagcccactgacagaccttaatcttaattactgctgtggctagagagtttgaggattgctttttaaaaaagacagcaaacttttttttttatttaaaaaaagatatattaacagttttagaagtcagtagaataaaatcttaaagcactcataatatggcatccttcaatttctgtataaaagcagatctttttaaaaaagatacttctgtaacttaagaaacctggcatttaaatcatattttgtctttaggtaaaagctttggtttgtgttcgtgttttgtttgtttcacttgtttccctcccagccccaaaccttttgttctctccgtgaaacttacctttccctttttctttctctttttttttttgtatattattgtttacaataaatatacattgcattaaaaagaaa

SEQ ID NO: 396 - DNA, 204 bp, Homo sapiens
  3' terminal sequence. cadherin 15, m-cadherin (myotubule) (CDH15) gene.
  modified_base (73): a, t, c or g
  modified_base (94): a, t, c or g
  modified_base (140): a, t, c or g
  modified_base (197): a, t, c or g
ttttttttttttttttttttttttttttttttttttttcattcagatttacccaggaggttgctgtctttcanacaaagatgaggttcactggnaggaggcaaaggtgggactagggaggtgacccgcatgggccagatnggagagaaactcttcccaccccggcagaaggggcctcttcctggccgccccatccanactcagg

SEQ ID NO: 397 - DNA, 457 bp, Homo sapiens
  5' terminal sequence. cadherin 15, m-cadherin (myotubule) (CDH15) gene.
  modified_base (91): a, t, c or g
  modified_base (254): a, t, c or g
  modified_base (367): a, t, c or g
  modified_base (457): a, t, c or g
caggacgcctacgacatcagccagctgcgtcacccgacagcgctgagcctgcctctgggaccgccgccacttcgcagagatgccccgcagncagcctgcacccccagccaccccgagtgctgcccaccagccccctggacatcgccgacttcatcaatgatggcttggaggctgcagatagtgaccccagtgtgccgccttacgacacagccctcatctatgactacgagggtgacggctcggtggcggggacntgagctccatcctgtccagccagggcgatgaggaccaggactacgactacctcagagactgggggccccgcttcgcccggctggcagacatgtatgggcacccgtgcgggttnggagttacggggccagatgggaccaccaggccagggagggtctttctcctggggcactgctacccagacacagaggccggacagcctgan

SEQ ID NO: 398 - DNA, 2833 bp, Homo sapiens
  cadherin 15, m-cadherin (myotubule) (CDH15) gene.
acttgcgctgtcactcagcctggacgcgcttcttcgggtcgcgggtgcactccggcccggctcccgcctcggccccgatggacgccgcgttcctcctcgtcctcgggctgttggcccagagcctctgcctgtctttgggggttcctggatggaggaggcccaccaccctgtacccctggcgccgggcgcctgccctgagccgcgtgcggagggcctgggtcatccccccgatcagcgtatccgagaaccacaagcgtctcccctaccccctggttcagatcaagtcggacaagcagcagctgggcagcgtcatctacagcatccagggacccggcgtggatgaggagccccggggcgtcttctctatcgacaagttcacagggaaggtcttcctcaatgccatgctggaccgcgagaagactgatcgcttcaggctaagagcgtttgccctggacctgggaggatccaccctggaggaccccacggacctggagattgtagttgtggatcagaatgacaaccggccagccttcctgcaggaggcgttcactggccgcgtgctggagggtgcagtcccaggcacctatgtgaccagggcagaggccacagatgccgacgaccccgagacggacaacgcagcgctgcggttctccatcctgcagcagggcagccccgagctcttcagcatcgacgagctcacaggagagatccgcacagtgcaagtggggctggaccgcgaggtggtcgcggtgtacaatctgaccctgcaggtggcggacatgtctggagacggcctcacagccactgcctcagccatcatcacccttgatgacatcaatgacaatgcccccgagttcaccagggatgagttcttcatggaggccatagaggccgtcagcggagtggatgtgggacgcctggaagtggaggacagggacctgccaggctccccaaactgggtggccaggttcaccatcctggaaggcgaccccgatgggcagttcaccatccgcacggaccccaagaccaacgagggtgttctgtccattgtgaaggccctggactatgagagctgtgaacactacgaactcaaagtgtcggtgcagaatgaggccccgctgcaggcggctgcccttagggctgagcggggccaggccaaggtccgcgtgcatgtgcaggacaccaacgagccccccgtgttccaggagaacccacttcggaccagcctagcagagggggcacccccaggcactctggtggccaccttctctgcccgggaccctgacacagagcagctgcagaggctcagctactccaaggactacgacccggaagactggctgcaagtggacgcagccactggccggatccagacccagcacgtgctcagcccggcgtcccccttcctcaagggcggctggtacagagccatcgtcctggcccaggatgacgcctcccagccccgcaccgccaccggcaccctgtccatcgagatcctggaggtgaacgaccatgcacctgtgctggccccgccgccgccgggcagcctgtgcagcgagccacaccaaggcccaggcctcctcctgggcgccacggatgaggacctgcccccccacggggcccccttccacttccagctgagccccaggctcccagagctcggccggaactggagcctcagccaggtcaacgtgagccacgcgcgcctgcggccgcgacaccaggtccccgaaggcctgcaccgcctcagcctgctgctccgggactcggggcagccgccccagcagcgcgagcagcctctgaacgtgaccgtgtgccgctgcggcaaggacggcgtctgcctgccgggggccgcagcgctgctggcggggggcacaggcctcagcctgggcgcactggtcatcgtgctggccagcgccctcctgctgctggtgctggtcctgctcgtggcactccgggcgcggttctggaagcagtctcggggcaaggggctgctgcacggcccccaggacgaccttcgagacaatgtcctcaactacgatgagcaaggaggcggggaggaggaccaggacgcctacgacatcagccagctgcgtcacccgacagcgctgagcctgcctctgggaccgccgccacttcgcagagatgccccgcagggccgcctgcacccccagccaccccgagtgctgcccaccagccccctggacatcgccgacttcatcaatgatggcttggaggctgcagatagtgaccccagtgtgccgccttacgacacagccctcatctatgactacgagggtgacggctcggtggcggggacgctgagctccatcctgtccagccagggcgatgaggaccaggactacgactacctcagagactgggggccccgcttcgcccggctggcagacatgtatgggcacccgtgcgggttggagtacggggccagatgggaccaccaggccagggagggtctttctcctggggcactgctacccagacacagaggccggacagcctgaccctggggcgcaactggacatgccactccccggcctcgtggcagtgatggcccctgcagaggcagcctgaggtcaccgggcccgacccccctgggcctggggcagcctccttcctgtaggcgagggcccaagtctgggggcagaacctgagtgtggatggggcggccaggaagaggccccttcctgccggggtgggaagagtttctctccatcggccccatgcgggtcacctccctagtcccacctttgcctcctaccagtgaacctcatctttgtatgaaagacagcaacctcctgggtaaatctgaatg

SEQ ID NO: 399 - DNA, 646 bp, Homo sapiens
  3' terminal sequence. b-cell cll/lymphoma 2 (BCL2) gene.
  modified_base (539): a, t, c or g
  modified_base (567): a, t, c or g
  modified_base (619): a, t, c or g
  modified_base (628): a, t, c or g
tatctcacactgtactttatttttcttcacaatattaactagacagacaaggaaagtttaatggcaatgtgactttttccaacaacacaaacaaagtgccattatagctaatggtggccaactggagacttactttaccttaaccatgtaaagtatccttaccgtattttttatgtgtacagtgttgcagaatatcagccacctcttaaaagtatcaatcttaaaaagagccatggaaggtaaaagtatgaaaatcttgataacaaaagctttcaatacaaaaacacttattgtacacttatttttatttaaaacaaaaataaccccagtaactcaaaacaaaagcaaaccttggttgaaaacttaagaaggtataataaacaaaaccaccaaaagaaagcttccccaaaagaaatgcaatccactgtcactcttgcaaattctaccttggagggaaaaacttaatgaaatgagctatctggagggcccacggagattttccaaaaggtttaggtgcatggatttactcagtatctacntacagtcttatttattaatagctcaganttcctgattgagcgagcctttccatctccaccagtgtccccacttctgtgcncacttgggntgcagacaccctgtgttg

SEQ ID NO: 400 - DNA, 465 bp, Homo sapiens
  5' terminal sequence. b-cell cll/lymphoma 2 (BCL2) gene.
ggtatttaaacaataaatgtgcagttttaactaacaggatatttaatgacaaccttctggttggtagggacatctgtttctaaatgtttattatgtacaatacagaaaaaaattttataaaattaagcaatgtgaaactgaattggagagtgataatacaagtcctttagtcttacccagtgaatcattctgttccatgtctttggacaaccatgaccttggacaatcatgaaatatgcatctcactggatgcaaagaaaatcagatggagcatgaatggtactgtaccggttcatctggactgccccagaaaaataacttcaagcaaacatcctatcaacaacaaggttgttctgcataccaagctgagcacagaagatgggaacactggtggaggatggaaaggctcgctcaatcaagaaaattctgagactattaataaataagactgtagtgtagatactg

SEQ ID NO: 401 - DNA, 418 bp, Homo sapiens
  3' terminal sequence. ests (EST W73386) gene.
  modified_base (90): a, t, c or g
  modified_base (93): a, t, c or g
  modified_base (317): a, t, c or g
  modified_base (355): a, t, c or g
  modified_base (370): a, t, c or g
  modified_base (396): a, t, c or g
gaaggtcattcttgcgatgggtttattgcaggagatgatggaccaaatggctctgacacatgcacacgctcctgggcacgcctgctgcgngtncgcttcccatgacccccagggccctctatgcctcccccccagggcaccctgcccacttgcccccacttcatgtaccaccaagccctttccttttctgggcaccactcctgagcagcgtgaccagcggcctccaagtgcatgtggctcagaacataaaagcatcttcaacattcgtcattgagccaaacgaaacacagtgtttggctcaagagccggcgacactngcatccctatccacacgtggaacctgcccttgggcttngttgaccggaggatnggccgctcttccttgtcatccagcanccggagcatgtatgtgcccaga

SEQ ID NO: 402 - DNA, 568 bp, Homo sapiens
  3' terminal sequence. granzyme a (granzyme 1, cytotoxic t-lymphocyte-associated serine esterase 3) (GZMA) gene.
  modified_base (47): a, t, c or g
  modified_base (327): a, t, c or g
  modified_base (432): a, t, c or g
  modified_base (480): a, t, c or g
  modified_base (485): a, t, c or g
  modified_base (529): a, t, c or g
  modified_base (554): a, t, c or g
  modified_base (563): a, t, c or g
tcatgcaaattgattttatttgtgaaaagattaagaagccacagtanatgaaaggaaacggttatttaaactgctcccttgatagtcataattatccagttgaggtgtttctttgagagaagaatatagacaccaggcccacgagggtctccgcatttattttcaaggccaaaggaagtgacccctcggaaaacaccctcgcacaacaaagggcttccagaatctccattgcacgagtctcttccacctcggaggcttccagcacaaaccatattcattccaatcacagggttaaaattatagtgatttcgatcattgcagactttnctgtctatgatgggtgatattgacttgcactcagagtatcgggacccaagatgcactattggtgagtcctgccccaccctggcaacttggcacatggttcctggntttcacatcaatccccctttttagggagatgaaggatagtcacatatntggtnattttggctttttccggtcagctgtaaagttttaaggtcccctncgcgtttggtggggcctagcctggnaggggaaanccttt

SEQ ID NO: 403 - DNA, 878 bp, Homo sapiens
  granzyme a (granzyme 1, cytotoxic t-lymphocyte-associated serine esterase 3) (GZMA) gene.
cagattttcaggttgattgatgtgggacagcagccacaatgaggaactcctatagatttctggcatcctctctctcagttgtcgtttctctcctgctaattcctgaagatgtctgtgaaaaaattattggaggaaatgaagtaactcctcattcaagaccctacatggtcctacttagtcttgacagaaaaaccatctgtgctggggctttgattgcaaaagactgggtgttgactgcagctcactgtaacttgaacaaaaggtcccaggtcattcttggggctcactcaataaccagggaagagccaacaaaacagataatgcttgttaagaaagagtttccctatccatgctatgacccagccacacgcgaaggtgaccttaaacttttacagctgacggaaaaagcaaaaattaacaaatatgtgactatccttcatctacctaaaaagggggatgatgtgaaaccaggaaccatgtgccaagttgcagggtgggggaggactcacaatagtgcatcttggtccgatactctgagagaagtcaatatcaccatcatagacagaaaagtctgcaatgatcgaaatcactataattttaaccctgtgattggaatgaatatggtttgtgctggaagcctccgaggtggaagagactcgtgcaatggagattctggaagccctttgttgtgcgagggtgttttccgaggggtcacttcctttggccttgaaaataaatgcggagaccctcgtgggcctggtgtctatattcttctctcaaagaaacacctcaactggataattatgactatcaagggagcagtttaaataaccgtttcctttcatttactgtggcttcttaatcttttcacaaataaa

SEQ ID NO: 404 - DNA, 191 bp, Homo sapiens
  3' terminal sequence. v-fos fbj murine osteosarcoma viral oncogene homolog (FOS) gene.
  modified_base (166): a, t, c or g
  modified_base (189): a, t, c or g
gcagtgaccgtgctcctacccagctctgcttcacagcgcccacctgtctccgcccctcggcccctcgcccggctttgctaaccgccacgatgatgttctcgggcttcaacgcagactacgaggcgtcatcctcccgctgcagcagcgcgtccccggccgggataanctctctttattacaattaatcancg

SEQ ID NO: 405 - DNA, 245 bp, Homo sapiens
  5' terminal sequence. v-fos fbj murine osteosarcoma viral oncogene homolog (FOS) gene.
  modified_base (204): a, t, c or g
  modified_base (223): a, t, c or g
  modified_base (230): a, t, c or g
  modified_base (234): a, t, c or g
  modified_base (237): a, t, c or g
  modified_base (240): a, t, c or g
  modified_base (242): a, t, c or g
ttttcaacttaaatgcttttattgacaatgtcttggaacaataagcaaacaatgcttaaatttttcattcaaattcactttccacatgtcaaaagacctcaaggtagaaaaaaataaaataaaaatataaatatctgagaatccatcttaataaataaattaaaaacacaataaaacgttttcatggaaaactgttaatgtccngaacattcagaccacctcnacaatgngtgntcngtnanatt

SEQ ID NO: 406 - DNA, 489 bp, Homo sapiens
  3' terminal sequence. interleukin enhancer binding factor 1 (ILF1) gene.
  modified_base (4): a, t, c or g
  modified_base (21): a, t, c or g
  modified_base (23): a, t, c or g
  modified_base (25): a, t, c or g
gcgncgcgctcaccgaagggngnangtagacagcgggtcagaggccgcctagagccggaggacaccccaaatacaaacataccacggagagacctgggatctgagtttcaaaagggcctgtgataaaagactgaatctttttccaaatgaagtagaaatggttctgtcgttttaaacatacacaatacttaggagacttgttttactcagagtggaaaattttgccagggacaaagtcaacacaaagaaacaaacaacaaaaaatagccagaaagagaacagttaagtgcagctcggtgagtcccggcagttccttcccggcactggctcgtccctgggttctcaaggttccatgcggccacagcgtccgtccacctgtccacgcgagccacatgctgaaatgggaggtgggataaaattcatcaggcagctgctgtaacacggaaatgtgcagatgccagagtagcttcgtctgaacttgaacaagac

SEQ ID NO: 407 - DNA, 247 bp, Homo sapiens
  5' terminal sequence. interleukin enhancer binding factor 1 (ILF1) gene.
  modified_base (229): a, t, c or g
  modified_base (234): a, t, c or g
tgttttcagcctatggaatgatttccttttgtctgtcttgttcaagttcagacgaagctactctggcatctgcacatttccgtgttacagcagctgcctgatgaattttatccacctccatttcagcatgtggctcgcgtggacaggtggacggacgctgtggccgcatggaaccttgagaacccagggacgagccagtgccgggaaggaactgccgggactcaccganctgcncttaactgttctc

SEQ ID NO: 408 - DNA, 3059 bp, Homo sapiens
  interleukin enhancer binding factor 1 (ILF1) gene.
gccccccccccacgcctcctcccctcctcccgcccgcgcgtgctcccgcccctcgccgccgctcgctcgctcgccggccggcctccgctcggccccctccctcagctccggtgcgcggcggccgacgacccgcggcctgggcctcggcgcgccaccggcgcccgcgcggagcggcccgggggccctcacgcaggcccatggcggcggcgcggcgcgctctcgggccgggcaccacgcgggcgcggggccgggggcgcggggccgggggcgggtcccgccgggcgctgggccgtgggccgcctggagggccgcgagttcgagtatctgatgaagaagcgctcggtgaccatcggccgcaactcgtcgcagggctcggtggacgtgagcatgggccactcgagcttcatctcccggcgccacctcgagatcttcacgcccccgggcggcgcggccatggcggggccgctccggagctgccgcccgcgcagcccaggcccgacgccggcggcgacttctacctgcgctgcttgggcaagaacggggtattcgtggacggcgtgttccagaggcgcggggcgccgccgctgcagctgccgcgcgtgtgcacattcaggttcccgagcacaaacatcaagataacgttcactgccctgtccagcgagaagagagagaagcaggaggcgtctgagtctccagtgaaggccgtacagccacacatctcgcccctgaccatcaacattccagacaccatggcccacctcatcagccctctgccctcccccacgggaaccatcagcgctgcaaactcctgcccctccagcccccggggagcggggtcttcagggtacaaggtgggccgagtgatgccatctgacctcaatttaatggctgacaactcacagcctgaaaatgaaaaggaagcttcaggtggagacagcccgaaggatgattcaaagccgccttactcctacgcgcagctgatagttcaggcgattacgatggctcccgacaaacagctcaccctgaacgggatttatacacacatcactaaaaattatccctactacaggactgcggacaagggctggcagaattcaattcgccacaatctctctctgaatcgttatttcatcaaagtgccgcgttcccaggaagaaccaggcaaaggctcgttctggaggatagacccagcctctgaaagcaaattaatagaacaggcttttaggaaacgacggcctaggggcgtgccctgctttagaacccctctgggaccgctctcttctaggagtgccccagcctctcccaatcacgcgggagtgctgtctgctcactctagtggcgcccagacccctgagagcctgtcgagggaaggttcgccggcccccctggagcctgagcctggcgctgcacagcccaaactcgctgtcatccaggaagcccggtttgcccagagcgccccagggtcacctctgtccagtcagccagtcttaatcaccgtccagcggcagctaccacaggccatcaagcctgtcacctacactgtggccaccccagtgaccacctcgacctcccagccacccgtcgtgcagacggttcacgtcgtccaccagatcccagcggtgtcggtcaccagtgtggccggactggccccagcgaacacgtacactgtctctggacaagctgtggtcaccccggcagccgtgctggcccctcctaaggcagaggcccaggagaatggagaccacagggaagtcaaagtgaaagtagagcctattcccgccattggccacgccacgctcggcactgccagccggatcattcagacggcacagaccaccccggtccagacggtgaccatagtacaacaggcacctctaggtcaacaccagctaccaataaaaactgtaacacaaaacggcactcacgtggcatcagtccccactgcggtccacggccaggtgaacaatgccgcggcgagtcctttgcacatgttggcaacacacgcatccgcatcggcctccctgcccacaaagcgccacaacggtgaccagccggagcagccggagctgaagcggatcaagacagaagacggcgagggcatcgtcattgccctgagcgtggacacgccaccggcagccgtaagggaaaagggtgtccagaactagcgaccgggagagcttttctttaacgatatcaactctgtggtgccaaaaggagacgcggcctcccgccagcactcgggggtgcagggccctgtggttggacttcacctctcagcactgaaaacccaaaacccagctggccttaacactccttaaagacagaagtcacacttgaacaaaacccacacacaacaaaacctgatttgggagacggtgtctccactgagcacctgctgggctgagcttctacctacgagtgaaactctgtcctcccgcgaggaccaggcatcgctgtgtgaggacggcacggccagcgcctgctgtgagtgggtctcccaagactaggcctcaggacgcggggggagccatccccgccgccctcacaggacccaccaggcagcggagacatgtggaattagagtattttgaggtgtcctttctttacaaaataatggggtcttgggcatttcacatcactccatttctactgagactttcagaatcacacaggccctttccgtggatttcatttggggcaaagaaacaacatagttttgtttttgttttcagcctatggaatgatttccttttgtctgtcttgttcaagttcagacgaagctactctggcatctgcacatttccgtgttacagcagctgcctgatgaattttatccacctccatttcagcatgtggctcgcgtggacaggtggacggacgctgtggccgcatggaaccttgagaacccagggacgagccagtgccgggaaggaactgccgggactcaccgagctgcacttaactgttctctttctggctattttttgttgtttgtttctttgtgttgactttgtccctggcaaaattttccactctgagtaaaacaagtctcggaattc

SEQ ID NO: 409 - DNA, 201 bp, Homo sapiens
  3' terminal sequence. rho gdp dissociation inhibitor (gdi) alpha (ARHGDIA) gene.
  modified_base (190): a, t, c or g
tttttttttttccttcaggggcatttatttcccggtcagaaaagaagcagggacaggcgcctctgcctgagcctggcagacacaacacgaagaccggggatggggcgggggaggcacaggagacggctctcagcaatgtgtgcacttggtcccttgtttgttcctggctgggtcagggaaggcctgccgngggtggtggca

SEQ ID NO: 410 - DNA, 297 bp, Homo sapiens
  5' terminal sequence. rho gdp dissociation inhibitor (gdi) alpha (ARHGDIA) gene.
  modified_base (79): a, t, c or g
  modified_base (140): a, t, c or g
  modified_base (289): a, t, c or g
ggcctctgctgccctttctgtgccccccaggttctatctccccgtcacacccgaggcctggcttcaggagggagcgganagccattctccaggccccgtggttgcccctggacgtgtgcgtctgctgctccggggtgganctggggtgtgggatgcacggcctcgtgggggccgggccgtcctccagccccgctgctccctggccagcccccttgtcgctgtcggtcccgtctaaccatgatgccttaacatgtggagtgtacctgtggggcctcactaagcctctaantcactgtg

SEQ ID NO: 411 - DNA, 1819 bp, Homo sapiens
  rho gdp dissociation inhibitor (gdi) alpha (ARHGDIA) gene.
cctgaaccgcgcggccgaaccctccggtgtcccgacccaggctaagcttgagcatggctgagcaggagcccacagccgagcagctggcccagattgcagcggagaacgaggaggatgagcactcggtcaactacaagcccccggcccagaagagcatccaggagatccaggagctggacaaggacgacgagagcctgcgaaagtacaaggaggccctgctgggccgcgtggccgtttccgcagaccccaacgtccccaacgtcgtggtgactggcctgaccctggtgtgcagctcggccccgggccccctggagctggacctgacgggcgacctggagagcttcaagaagcagtcgtttgtgctgaaggagggtgtggagtaccggataaaaatctctttccgggttaaccgagagatagtgtccggcatgaagtacatccagcatacgtacaggaaaggcgtcaagattgacaagactgactacatggtaggcagctatgggccccgggccgaggagtacgagttcctgacccccgtggaggaggcacccaagggtatgctggcccggggcagctacagcatcaagtcccgcttcacagacgacgacaagaccgaccacctgtcctgggagtggaatctcaccatcaagaaggactggaaggactgagcccagccagaggcgggcagggcagagtgatggacggaagacggacaggcggatgtgtcccccccagcccctcccctccccataccaaggtgctgagcaggccctccgtgcccctccaccctggtccgcctccctggcctggctcaaccgagtgcctccgacccccctcctcagccctcccccacccacaggcccagcctcctcggtctcctgtctcgttgctgcttctgcctgtgctgtgggggagagaggccgcagccaggcctctgctgccctttctgtgccccccaggttctatctccccgtcacacccgaggcctggcttcaggagggagcggagcagccattctccaggccccgtggttgcccctggacgtgtgcgtctgctgctccggggtggagctggggtgtgggatgcacggcctcgtgggggccgggccgtcctccagccccgctgctccctggccagcccccttgtcgctgtcggtcccgtctaaccatgatgccttaacatgtggagtgtaccgtggggcctcactagcctctactccctgtgtctgcatgagcatgtggcctccccgtcccttccccggtggcgaacccagtgacccagggacacgtggggtgtgctggtgctgctccccagcccaccaatgcctggccagcctgcccccttccctggacagggctgtggagatggctccggcggcttggggaaagcgaaattgccaacactcaagtcacctcagtaccatccaggaggctgggtattgtcctgcctctgccttttctgtctcagcggcagtgcccagagcccacacccccccaagagccctcgatggacaggcctgacccaccccacctggggccagccaggagccccgcctgggccatcagtatttattgcctccgtccgtgccgtccctgggccactggctggcgcctcttcccccagcctctcagtgccaccacccccggcagccttccctgacccagccaggacaaacaagggaccaagtgcacacattgctgagagccgtctcctataggtcccccgccccatccccggtgttggtgttgtgtctgccaggctcaggcagaggcgcctgtccctgcttcttttctgaccgggaaataaatgcccctgaagg

SEQ ID NO: 412 - DNA, 306 bp, Homo sapiens
  3' terminal sequence. complement component 4a (C4A) gene.
  modified_base (200): a, t, c or g
  modified_base (261): a, t, c or g
  modified_base (269): a, t, c or g
  modified_base (287): a, t, c or g
  modified_base (289): a, t, c or g
  modified_base (292): a, t, c or g
  modified_base (295): a, t, c or g
  modified_base (302): a, t, c or g
gctgccaaaagcctttaatatgccctggtcccaggctgtgttcatgaaagcggacacagcagtgcttccagcttcatggttcccaggttcaggttcctcccagcggaggtgggagggcagccctcacacctggcacccctgagtgcatactcctggaggaagtcgttgagctgggcacaggctgcccgctggcggttgcntccggcacaggcgttcagagggcatctcctcgatccagctattcgagtccagcaagtactngggggggnccctcccaggggcataantnggnccntccaganccat

SEQ ID NO: 413 - DNA, 5417 bp, Homo sapiens
  complement component 4a (C4A) gene.
agaaggtagcagacagacagacggatctaacctctcttggatcctccagccatgaggctgctctgggggctgatctgggcatccagcttcttcaccttatctctgcagaagcccaggttgctcttgttctctccttctgtggttcatctgggggtccccctatcggtgggggtgcagctccaggatgtgccccgaggacaggtagtgaaaggatcagtgttcctgagaaacccatctcgtaataatgtcccctgctccccaaaggtggacttcacccttagctcagaaagagacttcgcactcctcagtctccaggtgcccttgaaagatgcgaagagctgtggcctccatcaactcctcagaggccctgaggtccagctggtggcccattcgccatggctaaaggactctctgtccagaacgacaaacatccagggtatcaacctgctcttctcctctcgccgggggcacctctttttgcagacggaccagcccatttacaaccctggccagcgggttcggtaccgggtctttgctctggatcagaagatgcgcccgagcactgacaccatcacagtcatggtggagaactctcacggcctccgcgtgcggaagaaggaggtgtacatgccctcgtccatcttccaggatgactttgtgatcccagacatctcagagccagggacctggaagatctcagcccgattctcagatggcctggaatccaacagcagcacccagtttgaggtgaagaaatatgtccttcccaactttgaggtgaagatcacccctggaaagccctacatcctgacggtgccaggccatcttgatgaaatgcagttagacatccaggccaggtacatctatgggaagccagtgcagggggtggcatatgtgcgctttgggctcctagatgaggatggtaagaagactttctttcgggggctggagagtcagaccaagctggtgaatggacagagccacatttccctctcaaaggcagagttccaggacgccctggagaagctgaatatgggcattactgacctccaggggctgcgcctctacgttgctgcagccatcattgagtctccaggtggggagatggaggaggcagagctcacatcctggtattttgtgtcatctcccttctccttggatcttagcaagaccaagcgacaccttgtgcctggggcccccttcctgctgcaggccttggtccgtgagatgtcaggctccccagcttctggcattcctgtcaaagtttctgccacggtgtcttctcctgggtctgttcctgaagcccaggacattcagcaaaacacagacgggagcggccaagtcagcattccaataattatccctcagaccatctcagagctgcagctctcagtatctgcaggctccccacatccagcgatagccaggctcactgtggcagccccaccttcaggaggccccgggtttctgtctattgagcggccggattctcgacctcctcgtgttggggacactctgaacctgaacttgcgagccgtgggcagtggggccaccttttctcattactactacatgatcctatcccgagggcagatcgtgttcatgaatcgagagcccaagaggaccctgacctcggtctcggtgtttgtggaccatcacctggcaccctccttctactttgtggccttctactaccatggagaccacccagtggccaactccctgcgagtggatgtccaggctggggcctgcgagggcaagctggagctcagcgtggacggtgccaagcagtaccggaacggggagtccgtgaagctccacttagaaaccgactccctagccctggtggcgctgggagccttggacacagctctgtatgctgcaggcagcaagtcccacaagcccctcaacatgggcaaggtctttgaagctatgaacagctatgacctcggctgtggtcctgggggtggggacagtgcccttcaggtgttccaggcagcgggcctggccttttctgatggagaccagtggaccttatccagaaagagactaagctgtcccaaggagaagacaacccggaaaaagagaaacgtgaacttccaaaaggcgattaatgagaaattgggtcagtatgcttccccgacagccaagcgctgctgccaggatggggtgacacgtctgcccatgatgcgttcctgcgagcagcgggcagcccgcgtgcagcagccggactgccgggagcccttcctgtcctgctgccaatttgctgagagtctgcgcaagaagagcagggacaagggccaggcgggcctccaacgagccctggagatcctgcaggaggaggacctgattgatgaggatgacattcccgtgcgcagcttcttcccagagaactggctctggagagtggaaacagtggaccgctttcaaatattgacactgtggctccccgactctctgaccacgtgggagatccatggcctgagcctgtccaaaaccaaaggcctatgtgtggccaccccagtccagctccgggtgttccgcgagttccacctgcacctccgcctgcccatgtctgtccgccgctttgagcagctggagctgcggcctgtcctctataactacctggataaaaacctgactgtgagcgtccacgtgtccccagtggaggggctgtgcctggctgggggcggagggctggcccagcaggtgctggtgcctgcgggctctgcccggcctgttgccttctctgtggtgcccacggcagccgccgctgtgtctctgaaggtggtggctcgagggtccttcgaattccctgtgggagatgcggtgtccaaggttctgcagattgagaaggaaggggccatccatagagaggagctggtctatgaactcaaccccttggaccaccgaggccggaccttggaaatacctggcaactctgatcccaatatgatccctgatggggactttaacagctacgtcagggttacagcctcagatccattggacactttaggctctgagggggccttgtcaccaggaggcgtggcctccctcttgaggcttcctcgaggctgtggggagcaaaccatgatctacttggctccgacactggctgcttcccgctacctggacaagacagagcagtggagcacactgcctcccgagaccaaggaccacgccgtggatctgatccagaaaggctacatgcggatccagcagtttcggaaggcggatggttcctatgcggcttggttgtcacgggacagcagcacctggctcacagcctttgtgttgaaggtcctgagtttggcccaggagcaggtaggaggctcgcctgagaaactgcaggagacatctaactggcttctgtcccagcagcaggctgacggctcgttccaggacccctgtccagtgttagacaggagcatgcaggggggtttggtgggcaatgatgagactgtggcactcacagcctttgtgaccatcgcccttcatcatgggctggccgtcttccaggatgagggtgcagagccattgaagcagagagtggaagcctccatctcaaaggcaaactcatttttgggggagaaagcaagtgctgggctcctgggtgcccacgcagctgccatcacggcctatgccctgtcactgaccaaggcgcctgtggacctgctcggtgttgcccacaacaacctcatggcaatggcccaggagactggagataacctgtactggggctcagtcactggttctcagagcaatgccgtgtcgcccaccccggctcctcgcaacccatccgaccccatgccccaggccccagccctgtggattgaaaccacagcctacgccctgctgcacctcctgcttcacgagggcaaagcagagatggcagaccaggcttcggcctggctcacccgtcagggcagcttccaagggggattccgcagtacccaagacacggtgattgccctggatgccctgtctgcctactggattgcctcccacaccactgaggagaggggtctcaatgtgactctcagctccacaggccggaatgggttcaagtcccacgcgctgcagctgaacaaccgccagattcgcggcctggaggaggagctgcagttttccttgggcagcaagatcaatgtgaaggtgggaggaaacagcaaaggaaccctgaaggtccttcgtacctacaatgtcctggacatgaagaacacgacctgccaggacctacagatagaagtgacagtcaaaggccacgtcgagtacacgatggaagcaaacgaggactatgagtacgatgagcttccagccaaggatgacccagatgcccctctgcagcccgtgacacccctgcagctgtttgagggtcggaggaaccgccgcaggagggaggcgcccaaggtggtggaggagcaggagtccagggtgcactacaccgtgtgcatctggcggaacggcaaggtggggctgtctggcatggccatcgcggacgtcaccctcctgagtggattccacgccctgcgtgctgacctggagaagctgacctccctctctgaccgttacgtgagtcactttgagaccgaggggccccacgtcctgctgtattttgactcggtccccacctcccgggagtgcgtgggctttgaggctgtgcaggaagtgccggtggggctggtgcagccggccagcgcaaccctgtacgactactacaaccccgagcgcagatgttctgtgttttacggggcaccaagtaagagcagactcttggccaccttgtgttctgctgaagtctgccagtgtgctgaggggaagtgccctcgccagcgtcgcgccctggagcggggtctgcaggacgaggatggctacaggatgaagtttgcctgctactacccccgtgtggagtacggcttccaggttaaggttctccgagaagacagcagagctgctttccgcctctttgagaccaagatcacccaagtcctgcacttcaccaaggatgtcaaggccgctgctaatcagatgcgcaacttcctggttcgagcctcctgccgccttcgcttggaacctgggaaagaatatttgatcatgggtctggatggggccacctatgacctcgagggacacccccagtacctgctggactcgaatagctggatcgaggagatgccctctgaacgcctgtgccggagcacccgccagcgggcagcctgtgcccagctcaacgacttcctccaggagtatggcactcaggggtgccaggtgtgagggctgccctcccacctccgctgggaggaacctgaacctgggaaccatgaagctggaagcactgctgtgtccgctttcatgaacacagcctgggaccagggcatattaaaggcttttggcagcaaagtgtcagtgttggc

SEQ ID NO: 414 - DNA, 408 bp, Homo sapiens
  3' terminal sequence. cd3g antigen, gamma polypeptide (tit3 complex) (CD3G) gene.
  modified_base (346): a, t, c or g
ttacaattttccccaataggtggcgcttctgaaacacagtatttgtttttatttttattttatttgagaaacccccaaatttgctctgatggcctttcttctccatttgtcatctctgggaaccttgagtctagatttagggctgaaagtctctctgctaggagctttccaaaatgcattgctttgattctgggaactgaataggaggagaacacctggactactctgagtcctgagttcaattcctcctcaactggtttccttgaaggtggctgtactggtcatcttctcgatccttgaggggctggtagagctggtcattgggcaacagagtctgcttgtctgnaagctctcgactgggcgaactccatcctgtccagcaatgaagtagaccccaaaggcaaggac

SEQ ID NO: 415 - DNA, 457 bp, Homo sapiens
  5' terminal sequence. cd3g antigen, gamma polypeptide (tit3 complex) (CD3G) gene.
  modified_base (236): a, t, c or g
  modified_base (450): a, t, c or g
aaccacttggttaaggtgtatgactatcaagaagatggttcggtacttctgacttgtgatgcagaagccaaaaatatcacatggtttaaagatgggaagatgatcggcttcctaactgaagataaaaaaaaatggaatctgggaagtaatgccaaggaccctcgagggatgtatcagtgtaaaggatcacagaacaagtcaaaaccactccaagtgtattacagaatgtgtcaganctgcattgaactaaatgcagccaccatatctggctttctctttgctgaaatcgtcagcattttcgtccttgcctttggggtctacttcattgctggacaggatggagttcgccagtcgagagcttcagacaagcagactctgttgcccaatgaccagctctaccagcccctcaaggatccgaggaagatgaccagtacagccaccttcaagggnaaccagt

SEQ ID NO: 416 - DNA, 822 bp, Homo sapiens
  cd3g antigen, gamma polypeptide (tit3 complex) (CD3G) gene.
gggctgctccacgcttttgccggagacagagactgacatggaacaggggaagggcctggctgtcctcatcctggctatcattcttcttcaaggtactttggcccagtcaatcaaaggaaaccacttggttaaggtgtatgactatcaagaagatggttcggtacttctgacttgtgatgcagaagccaaaaatatcacatggtttaaagatgggaagatgatcggcttcctaactgaagataaaaaaaaatggaatctgggaagtaatgccaaggaccctcgagggatgtatcagtgtaaaggatcacagaacaagtcaaaaccactccaagtgtattacagaatgtgtcagaactgcattgaactaaatgcagccaccatatctggctttctctttgctgaaatcgtcagcattttcgtccttgctgttggggtctacttcattgctggacaggatggagttcgccagtcgagagcttcagacaagcagactctgttgcccaatgaccagctctaccagcccctcaaggatcgagaagatgaccagtacagccaccttcaaggaaaccagttgaggaggaattgaactcaggactcagagtagtccaggtgttctcctcctattcagttcccagaatcaaagcaatgcattttggaaagctcctagcagagagactttcagccctaaatctagactcaaggttcccagagatgacaaatggagaagaaaggccatcagagcaaatttgggggtttctcaaataaaataaaaataaaaacaaatactgtgtttcagaagcgccacctattggggaaaattgt

SEQ ID NO: 417 - DNA, 439 bp, Homo sapiens
  3' terminal sequence. v-rel avian reticuloendotheliosis viral oncogene homolog b (nuclear factor of kappa light polypeptide gene enhancer in b-cells 3) (RELB) gene.
  modified_base (63): a, t, c or g
  modified_base (73): a, t, c or g
  modified_base (268): a, t, c or g
acatctttattgggaagactctgaacaaccaacctaccccccaccttcaagtctggggaaggnagggcaggantctgccccctcctcccatatgtacaatcttttccgaatcctactggagaaggtgcccccacatgtggaacagaggcagctgtaacaagctagtgcacgggagccatgtcccttttcctctccggactcagtttcctcatctgtaaaatgggctcaaggggaaacccgtgcaacgaggcttctcgccaaggctgantatgtccacttcagaagcatgaggaagggccaaggggatgggggtgctagacatcctgggttgggattgcacggctcctccacctccctccccacccagtgcccctcctctggcatcgcggggctacgtggcttcaggcccggggataggaggccgcccccaaaggccgct

SEQ ID NO: 418 - DNA, 234 bp, Homo sapiens
  5' terminal sequence. v-rel avian reticuloendotheliosis viral oncogene homolog b (nuclear factor of kappa light polypeptide gene enhancer in b-cells 3) (RELB) gene.
  modified_base (193): a, t, c or g
  modified_base (214): a, t, c or g
acgggggatgcccaacgtccttggggagctgaacagtctggacccccatggcatcgagagcaaacggcggaagaaaaagccggccatcctggaccacttcctgcccaaccacggctcaggcccgttcctcccgccgtcagccctgctgccagaccctgacttcttctctgggcaccgtgttccctgcccggcngggaggccctggggggcctgnacctcctgggacgatgggtt

SEQ ID NO: 419 - DNA, 2314 bp, Homo sapiens
  v-rel avian reticuloendotheliosis viral oncogene homolog b (nuclear factor of kappa light polypeptide gene enhancer in b-cells 3) (RELB) gene.
ggaattcccgcccggcccggccccgcgccccgcagccccgggcgccgcgcgtcctgcccggcctgcggcccagcccttgcgccgctcgtccgacccgcgatcgtccaccagaccgtgcctcccggccgcccgggccccgcgtgcatgcttcggtctgggccagcctctgggccgtccgtccccactggccgggccatgccgagtcgccgcgtcgccagaccgccggctgcgccggagctgggggccttagggtcccccgacctctcctcactctcgctcgccgtttccaggagcacagatgaattggagatcatcgacgagtacatcaaggagaacggcttcggcctggacgggggacagccgggcccgggcgaggggctgccacgcctggtgtctcgcggggctgcgtccctgagcacggtcaccctgggccctgtggcgcccccagccacgccgccgccttggggctgccccctgggccgactagtgtccccagcgccgggcccgggcccgcagccgcacctggtcatcacggagcagcccaagcagcgcggcatgccgttccgctacgagtgcgagggccgctcggccggcagcatccttggggagagcagcaccgaggccagcaagacgctgcccgccatcgagctccgggattgtggagggctgcgggaggtggaggtgactgcctgcctggtgtggaaggactggcctcaccgagtccacccccacagcctcgtggggaaagactgcaccgacggcatctgcagggtgcggctccggcctcacgtcagcccccggcacagttttaacaacctgggcatccagtgtgtgaggaagaaggagattgaggctgccattgagcggaagattcaactgggcattgacccctacaacgctgggtccctgaagaaccatcaggaagtagacatgaatgtggtgaggatctgcttccaggcctcatatcgggaccagcagggacagatgcgccggatggatcctgtgctttccgagcccgtctatgacaagaaatccacaaacacatcagagctgcggatttgccgaattaacaaggaaagcgggccgtgcaccggtggcgaggagctctacttgctctgcgacaaggtgcagaaagaggacatatcagtggtgttcagcagggcctcctgggaaggtcgggctgacttctcccaggccgacgtgcaccgccagattgccattgtgttcaagacgccgccctacgaggacctggagattgtcgagcccgtgacagtcaacgtcttcctgcagcggctcaccgatggggtctgcagcgagccattgcctttcacgtacctgcctcgcgaccatgacagctacggcgtggacaagaaggcgaaacgggggatgcccgacgtccttggggagctgaacagctctgacccccatggcatcgagagcaaacggcggaagaaaaagccggccatcctggaccacttcctgcccaaccacggctcaggcccgttcctcccgccgtcagccctgctgccagaccctgacttcttctctggcaccgtgtccctgcccggcctggagccccctggcgggcctgacctcctggacgatggctttgcctacgaccctacggcccccacactcttcaccatgctggacctgctgcccccggcaccgccacacgctagcgctgttgtgtgcagcggaggtgccggggccgtggttggggagacccccggccctgaaccactgacactggactcgtaccaggccccgggccccggggatggaggcaccgccagccttgtgggcagcaacatgttccccaatcattaccgcgaggcggcctttgggggcggcctcctatccccggggcctgaagccacgtagccccgcgatgccagaggaggggcactgggtggggagggaggtggaggagccgtgcaatcccaaccaggatgtctagcacccccatccccttggcccttcctcatgcttctgaagtggacatattcagccttggcgagaagctccgttgcacgggtttccccttgagcccattttacagatgaggaaactgagtccggagaggaaaagggacatggctcccgtgcactagcttgttacagctgcctctgtccccacatgtgggggcaccttctccagtaggattcggaaaagattgtacatatgggaggagggggcagattcctggccctccctccccagacttgacttgaaggtggggggtaggttggttgttcagagtcttcccaataaagatgagtttttgagcctcaaaaaaaaaaaaaggaattcc

SEQ ID NO: 420 - DNA, 214 bp, Homo sapiens
  3' terminal sequence. estrogen receptor 1 (ESR1) gene.
tttagttgtaattctttatttgaacatcaaataggttgagaaaattgtttacaggtgctcgagcatcccgctggattctttttcaaagtgcaaaagaggtttacaagtgtgtttcattaaacaaagcaaagctgcgacaaaaccgagtcacatcagtaatagtatgcatcggcaaaagggcatattaatccatcaaacacaatttggcatttga

SEQ ID NO: 421 - DNA, 520 bp, Homo sapiens
  5' terminal sequence. estrogen receptor 1 (ESR1) gene.
tgaaaacttactctcaactggagcaaatgaactttggtcccaaatatccatcttttcagtagcgttaattatgctctgtttccaactgcatttcctttccaattgaattaaagtgtggcctcgtttttagtcatttaaaattgttttctaagtaattgctgcctctattatggcacttcaattttgcactgtcttttgagattcaagaaaaatttctattcttttttttgcatccaattgtgcctgaacttttaaaatatgtaaatgctgccatgttccaaacccatcgtcagtgtgtgtgtttagagctgtcaccctagaaacaacatattgtcccatgagcaggtgcctgagacacagacccctttgcattcacagagaggtcattggttatagagacttgaattaataagtgacattatgccagtttctgttctctcacaggtgataaacaatgctttttgtgcactacatactcttcagtgtagagctcttgttttatgggaaaaggctcaaatgc

SEQ ID NO: 422 - DNA, 6450 bp, Homo sapiens
  estrogen receptor 1 (ESR1) gene.
gagttgtgcctggagtgatgtttaagccaatgtcagggcaaggcaacagtccctggccgtcctccagcacctttgtaatgcatatgagctcgggagaccagtacttaaagttggaggcccgggagcccaggagctggcggagggcgttcgtcctgggagctgcacttgctccgtcgggtcgccggcttcaccggaccgcaggctcccggggcagggccggggccagagctcgcgtgtcggcgggacatgcgctgcgtcgcctctaacctcgggctgtgctctttttccaggtggcccgccggtttctgagccttctgccctgcggggacacggtctgcaccctgcccgcggccacggaccatgaccatgaccctccacaccaaagcatctgggatggccctactgcatcagatccaagggaacgagctggagcccctgaaccgtccgcagctcaagatccccctggagcggcccctgggcgaggtgtacctggacagcagcaagcccgccgtgtacaactaccccgagggcgccgcctacgagttcaacgccgcggccgccgccaacgcgcaggtctacggtcagaccggcctcccctacggccccgggtctgaggctgcggcgttcggctccaacggcctggggggtttccccccactcaacagcgtgtctccgagcccgctgatgctactgcacccgccgccgcagctgtcgcctttcctgcagccccacggccagcaggtgccctactacctggagaacgagcccagcggctacacggtgcgcgaggccggcccgccggcattctacaggccaaattcagataatcgacgccagggtggcagagaaagattggccagtaccaatgacaagggaagtatggctatggaatctgccaaggagactcgctactgtgcagtgtgcaatgactatgcttcaggctaccattatggagtctggtcctgtgagggctgcaaggccttcttcaagagaagtattcaaggacataacgactatatgtgtccagccaccaaccagtgcaccattgataaaaacaggaggaagagctgccaggcctgccggctccgcaaatgctacgaagtgggaatgatgaaaggtgggatacgaaaagaccgaagaggagggagaatgttgaaacacaagcgccagagagatgatggggagggcaggggtgaagtggggtctgctggagacatgagagctgccaacctttggccaagcccgctcatgatcaaacgctctaagaagaacagcctggccttgtccctgacggccgaccagatggtcagtgccttgttggatgctgagccccccatactctattccgagtatgatcctaccagacccttcagtgaagcttcgatgatgggcttactgaccaacctggcagacagggagctggttcacatgatcaactgggcgaagagggtgccaggctttgtggatttgaccctccatgatcaggtccaccttctagaatgtgcctggctagagatcctgatgattggtctcgtctggcgctccatggagcacccagtgaagctactgtttgctcctaacttgctcttggacaggaaccagggaaaatgtgtagagggcatggtggagatcttcgacatgctgctggctacatcatctcggttccgcatgatgaatctgcagggagaggagtttgtgtgcctcaaatctattattttgcttaattctggagtgtacacatttctgtccagcaccctgaagtctctggaagagaaggaccatatccaccgagtcctggacaagatcacagacactttgatccacctgatggccaaggcaggcctgaccctgcagcagcagcaccagcggctggcccagctcctcctcatcctctcccacatcaggcacatgagtaacaaaggcatggagcatctgtacagcatgaagtgcaagaacgtggtgcccctctatgacctgctgctggagatgctggacgcccaccgcctacatgcgcccactagccgtggaggggcatccgtggaggagacggaccaaagccacttggccactgcgggctctacttcatcgcattccttgcaaaagtattacatcacgggggaggcagagggtttccctgccacagtctgagagctccctggctcccacacggttcagataatccctgctgcattttaccctcatcatgcaccactttagccaaattctgtctcctgcatacactccggcatgcatccaacaccaatggctttctagatgagtggccattcatttgcttgctcagttcttagtggcacatcttctgtcttctgttgggaacagccaaagggattccaaggctaaatctttgtaacagctctctttcccccttgctatgttactaagcgtgaggattcccgtagctcttcacagctgaactcagtctatgggttggggctcagataactctgtgcatttaagctacttgtagagacccaggcctggagagtagacattttgcctctgataagcactttttaaatggctctaagaataagccacagcaaagaatttaaagtggctcctttaattggtgacttggagaaagctaggtcaagggtttattatagcaccctcttgtattcctatggcaatgcatccttttatgaaagtggtacaccttaaagcttttatatgactgtagcagagtatctggtgattgtcaattcacttccccctataggaatacaaggggccacacagggaaggcagatcccctagttggccaagacttattttaacttgatacactgcagattcagagtgtcctgaagctctgcctctggctttccggtcatgggttccagttaattcatgcctcccatggacctatggagagcaacaagttgatcttagttaagtctccctatatgagggataagttcctgatttttgtttttatttttgtgttacaaaagaaagccctccctccctgaacttgcagtaaggtcagcttcaggacctgttccagtgggcactgtacttggatcttcccggcgtgtgtgtgccttacacaggggtgaactgttcactgtggtgatgcatgatgagggtaaatggtagttgaaaggagcaggggccctggtgttgcatttagccctggggcatggagctgaacagtacttgtgcaggattgttgtggctactagagaacaagagggaaagtagggcagaaactggatacagttctgagcacagccagacttgctcaggtggccctgcacaggctgcagctacctaggaacattccttgcagaccccgcattgcctttgggggtgccctgggatccctggggtagtccagctcttattcatttcccagcgtggccctggttggaagaagcagctgtcaagttgtagacagctgtgttcctacaattggcccagcaccctggggcacgggagaagggtggggaccgttgctgtcactactcaggctgactggggcctggtcagattacgtatgcccttggtggtttagagataatccaaaatcagggtttggtttggggaagaaaatcctcccccttcctcccccgccccgttccctaccgcctccactcctgccagctcatttccttcaatttcctttgacctataggctaaaaaagaaaggctcattccagccacagggcagccttccctgggcctttgcttctctagcacaattatgggttacttcctttttcttaacaaaaaagaatgtttgatttcctctgggtgaccttattgtctgtaattgaaaccctattgagaggtgatgtctgtgttagccaatgacccaggtagctgctcgggcttctcttggtatgtcttgtttggaaaagtggatttcattcatttctgattgtccagttaagtgatcaccaaaggactgagaatctgggagggcaaaaaaaaaaaaaaaagtttttatgtgcacttaaatttggggacaattttatgtatctgtgttaaggatatgcttaagaacataattcttttgttgctgtttgtttaagaagcaccttagtttgtttaagaagcaccttatatagtataatatatatttttttgaaattacattgcttgtttatcagacaattgaatgtagtaattctgttctggatttaatttgactgggttaacatgcaaaaaccaaggaaaaatatttagtttttttttttttttttgtatacttttcaagctaccttgtcatgtatacagtcatttatgcctaaagcctggtgattattcatttaaatgaagatcacatttcatatcaacttttgtatccacagtagacaaaatagcactaatccagatgcctattgttggatattgaatgacagacaatcttatgtagcaaagattatgcctgaaaaggaaaattattcagggcagctaattttgcttttaccaaaatatcagtagtaatatttttggacagtagctaatgggtcagtgggttctttttaatgtttatacttagattttcttttaaaaaaattaaaataaaacaaaaaaaatttctaggactagacgatgtaataccagctaaagccaaacaattatacagtggaaggttttacattattcatccaatgtgtttctattcatgttaagatactactacatttgaagtgggcagagaacatcagatgattgaaatgttcgcccaggggtctccagcaactttggaaatctctttgtatttttacttgaagtgccactaatggacagcagatattttctggctgatgttggtattgggtgtaggaacatgatttaaaaaaaaaactcttgcctctgctttcccccactctgaggcaagttaaaatgtaaaagatgtgatttatctggggggctcaggtatggtggggaagtggattcaggaatctggggaatggcaaatatattaagaagagtattgaaagtatttggaggaaaatggttaattctgggtgtgcaccaaggttcagtagagtccacttctgccctggagaccacaaatcaactagctccatttacagccatttctaaaatggcagcttcagttctagagaagaaagaacaacatcagcagtaaagtccatggaatagctagtggtctgtgtttcttttcgccattgcctagcttgccgtaatgattctataatgccatcatgcagcaattatgagaggctaggtcatccaaagagaagaccctatcaatgtaggttgcaaaatctaacccctaaggaagtgcagtctttgatttgatttccctagtaaccttgcagatatgtttaaccaagccatagcccatgccttttgagggctgaacaaataagggacttactgataatttacttttgatcacattaaggtgttctcaccttgaaatcttatacactgaaatggccattgatttaggccactggcttagagtactccttcccctgcatgacactgattacaaatactttcctattcatactttccaattatgagatggactgtgggtactgggagtgatcactaacaccatagtaatgtctaatattcacaggcagatctgcttggggaagctagttatgtgaaaggcaaataaagtcatacagtagctcaaaaggcaaccataattctctttggtgcaagtcttgggagcgtgatctagattacactgcaccattcccaagttaatcccctgaaaacttactctcaactggagcaaatgaactttggtcccaaatatccatcttttcagtagcgttaattatgctctgtttccaactgcatttcctttccaattgaattaaagtgtggcctcgtttttagtcatttaaaattgttttctaagtaattgctgcctctattatggcacttcaattttgcactgtcttttgagattcaagaaaaatttctattcatttttttgcatccaattgtgcctgaacttttaaaatatgtaaatgctgccatgttccaaacccatcgtcagtgtgtgtgtttagagctgtgcaccctagaaacaacatacttgtcccatgagcaggtgcctgagacacagacccctttgcattcacagagaggtcattggttatagagacttgaattaataagtgacattatgccagtttctgttctctcacaggtgataaacaatgctttttgtgcactacatactcttcagtgtagagctcttgttttatgggaaaaggctcaaatgccaaattgtgtttgatggattaatatgcccttttgccgatgcatactattactgatgtgactcggttttgtcgcagctttgctttgtttaatgaaacacacttgtaaacctcttttgcactttgaaaaagaatccagcgggatgctcgagcacctgtaaacaattttctcaacctatttgatgttcaaataaagaattaaact

SEQ ID NO: 423 - DNA, 580 bp, Homo sapiens
  3' terminal sequence. pre-b-cell leukemia transcription factor 1 (PBX1) gene.
  modified_base (320): a, t, c or g
ttaaacgtacaaacacttttattattttctttgtaatttttttcctctttaaattcctctaattgttgaaaatatccttcagtgatatgcgagagggcgggcacccgggagtctaggacagaggcacaggggcagggaagatgacgaaaaccaggctgacagctggaggcagggaagggtggcttctacccagaaaaaaaaggggagagagtataaagaagtgtccagattggctgaaatagcatcccaaagaagagaagagaaggagactcttattgtgtttgctgattgcttcgacctccagtctgaccgcttcaggnttgggagagaaaccctcccttcctgcccctgccccaactgggcgacagggtcagccgggatgcgattgctgggagatcagttggaggtatcagagtgaacactgccagggccttctgtaggggaggtcactgatgaaggggtagtagcatcctgccaacctccattagcactgatgccctgcggactgtacatctgactggctgcgagtccatcactgtatcctcctgtctggctgataacatggcgaagggtatccacc

SEQ ID NO: 424 - DNA, 503 bp, Homo sapiens
  5' terminal sequence. pre-b-cell leukemia transcription factor 1 (PBX1) gene.
gccaaagaggagttagccaagaagtgtggcaccacagtctcccaggtatcacaactggtttggaaataagcgaatccggtacaagaagaacataggtaaatttcaagaggaagccaatatttatgctgccaaaacagctgtcactgctaccaatgtgtcagcccatggaagccaagctaactcgccctcaactcccaactcggctggtggatacccttcgccatgttatcagccagacaggaggatacagtgatggactcgcagccagtcagatgtacagtccgcaggcatcagtgctaatggaggttggcaggatgctactaccccttcatcagtgacctcccctacagaaggccctggcagtgttcactctgatacctccaactgatctcccagcaatcgcatcccggctgaccctgtgccccagttgggcaggggcaggagggagggtttctctcccaacgctgaagcggtcagactggaggtcaaacgattaggcaaac

SEQ ID NO: 425 - DNA, 1819 bp, Homo sapiens
  pre-b-cell leukemia transcription factor 1 (PBX1) gene.
cttccctgtttatcctgaaaaggatttgaagacaagcttgaaggataaaaagccttggtgcttcccaggagccgagccgaggagcagaagaggaagagccgggggctgccgtagcctttggagatggacgagcagcccaggctgatgcattcccatgctggggtcgggatggccggacaccccggcctgtcccagcacttgcaggatggggccggagggaccgagggggagggcgggaggaagcaggacattggagacattttacagcaaattatgaccatcacagaccagagtttggatgaggcgcaggccagaaaacatgctttaaactgccacagaatgaagcctgccttgtttaatgtgttgtgtgaaatcaaagaaaaaacagttttgagtatccgaggagcccaggaggaggaacccacagacccccagctgatgcggctggacaacatgctgttagcggaaggcgtggcggggcctgagaagggcggagggtcggcggcagcggcggcagcggcggcggcttctggaggggcaggttcagacaactcagtggagcattcagattacagagccaaactctcacagatcagacaaatctaccatacggagctggagaaatacgagcaggcctgcaacgagttcaccacccacgtgatgaatctcctgcgagagcaaagccggaccaggcccatctccccaaaggagattgagcggatggtcagcatcatccaccgcaagttcagctccatccagatgcagctcaagcagagcacgtgcgaggcggtgatgatcctgcgttcccgatttctggatgcgcggcggaagagacggaatttcaacaagcaagcgacagaaatcctgaatgaatatttctattcccatctcagcaacccttaccccagtgaggaagccaaagaggagttagccaagaagtgtggcatcacagtctcccaggtatcaaactggtttggaaataagcgaatccggtacaagaagaacataggtaaatttcaagaggaagccaatatttatgctgccaaaacagctgtcactgctaccaatgtgtcagcccatggaagccaagctaactcgccctcaactcccaactcggctggttcttccagttcttttaacatgtcaaactctggagatttgttcatgagcgtgcagtcactcaatggggattcttaccaaggggcccaggttggagccaacgtgcaatcacaggtggatacccttcgccatgttatcagccagacaggaggatacagtgatggactcgcagccagtcagatgtacagtccgcagggcatcagtgctaatggaggttggcaggatgctactaccccttcatcagtgacctcccctacagaaggccctggcagtgttcactctgatacctccaactgatctcccagcaatcgcatcccggctgaccctctgccccagttggggcaggggcaggagggagggtttctctcccaagctgaagcggtcagactggaggtcgaagcaatcagcaaacacaataagagtctccttctcttctcttctttgggatgctatttcagccaatctggacacttctttatactctcttcccttttttttctgggtagaagccacccttccctgcctccagctgtcagcctggttttcgtcatcttccctgcccctgtgcctctgtcctagacttcccggggtccccgccctctctcatatcactgaaggatattttcaacaattagaggaatttaaagaggaaaaaaattacaaagaaaataataaaagtgtttgtacgttttcaaaaaaa

SEQ ID NO: 426 - DNA, 506 bp, Homo sapiens
  3' terminal sequence. gli-kruppel family member gli3 (greig cephalopolysyndactyly syndrome) (GLI3) gene.
taaaaagagggtggtttgagtgtaacaatactgattcaaaactgaaatggaagacagtttctccctagaatactttagggtttttcagagtccttttccataaaaggaatataattgaaacacatctcagttaggtgagatgagattgctaaaatacatacagaactaaaaaaacagccaaaacaaagtcagtttaatctcttcaactcctaatgatttccgttggttgcagtctttttttcctaaagcctattgcataactgcaagggaattgctttcttccgctagggaggtcagcaaagaactcatgtccccgatagccatgttggtggtgctcatggacagcgctgggaatgggagggacgcccgagggctggttaaagccggaagaacctatggaaaaggtctcaatgatacttgggctcagggccccgacatcaggctcgagtggtccccatctctatgattgcatcgaagtcaatctggtaccctcccaggccaggctg

SEQ ID NO: 427 - DNA, 239 bp, Homo sapiens
  5' terminal sequence. gli-kruppel family member gli3 (greig cephalopolysyndactyly syndrome) (GLI3) gene.
ggcagaaggatcacttgaggccaggcattcaagaccagcctatgcaagataatgagaccttgtctctatttaaaaaacaaaaagcctggtgtggtggtgcatgcctgtagtctcagcctcctgagtagctgggactataagcacgcaccactatgtctggctaatttttgtatttttagtagagacagggtttcaccacgttgcccagggcagtcttgaactcctgaccccaagtgatc

SEQ ID NO: 428 - DNA, 5054 bp, Homo sapiens
  gli-kruppel family member gli3 (greig cephalopolysyndactyly syndrome) (GLI3) gene.
cgatactacgtgggcatttttggtcgaagagagctgaagtaatgagaagacatcatggaggcccagtcccacagctccacgaccactgaaaagaaaaaagttgagaattccatagtgaagtgctccactcgaacagatgtgagcgagaaagccgttgcctccagcaccacttctaatgaggatgaaagtcctggacagacttatcacagagagagaagaaacgcaatcactatgcagccacagaatgtccaggggctcagcaaagtcagtgaggaaccttcaacatcgagtgacgagagggcctcattgatcaagaaagagatccatgggtccctgccacacgtggcggagccctctgtgccgtaccgcgggacggtgtttgccatggaccccaggaatggttacatggagccccactaccaccctcctcatcttttccctgccttccatcctcctgtaccaattgatgccagacatcatgagggccgttaccattacgatccatctccgattcctccattgcatatgacttccgccttatctagtagccctacgtatccggacctgcccttcattaggatctccccacaccggaaccccgctgctgcttccgagtctcccttcagccctccacatccctacattaatccctacatggactatatccgctccttgcacagcagcccatcgctctccatgatctcagcaacccgtgggctgagccctacagatgcgccccatgcaggagtcagcccagcagaatactatcatcagatggccctgctaactggccagcgcagcccctatgcagacattattccctcagctgccaccgccggcacgggggccatccacatggaatatcttcatgctatggatagcaccagattctccagccccaggctgtcagccaggccgagccgaaaacgtacactgtccatatcaccactctccgatcatagctttgaccttcagaccatgataaggacgtctcccaactccttggtcacgattctcaataattcccgtagcagctcttcagcaagtggctcctatggtcacttatctgcaagtgcaatcagccctgccttgagcttcacctactcttccgcgcccgtctctctccacatgcatcagcagatcctaagccgacaacagagcttaggttcagcctttggacacagccctccactcatccaccctgccccaacttttccaacacagaggcctattccagggatccctacggttctgaaccccgtccaggtcagctccggcccttctgagtcctcacagaacaagcccacgagtgagtctgcagtgagcagcactggtgacccgatgcacaacaagaggtccaagatcaaacccgatgaagacctccccagcccaggggctcgggggcagcaggaacagcccgaaggaacaacccttgtcaaggaggaaggggacaaagatgaaagcaaacaggagcctgaagtcatctatgagacaaactgccactgggaaggctgcgcgagggagttcgacacccaagagcagcttgtgcaccatataaataacgaccatattcatggagagaagaaggagttcgtgtgcaggtggctggactgctcaagagagcagaaacccttcaaagcccagtatatgttggtagtgcatatgagaagacacacgggcgagaagcctcacaaatgcacttttgaaggttgcacaaaggcctactcgagactagaaaacttgaaaacacacttgagatctcacactggagagaaaccatacgtctgtgagcacgaaggttgcaacaaggctttctcaaatgcctctgatcgcgccaaacaccaaaacagaacgcattccaatgagaaaccatatgtgtgcaaaatcccaggctgcactaagcgttacacagacccaagctccctccggaaacatgtgaagacagtgcatggcccagaggctcatgtcaccaagaagcagcgaggggacatccatcctcggccgccacccccgagagattccggcagccattcacagtccaggtcgcctggccgaccgactcagggagcccttggtgagcagcaggacctcagcaacactacctcaaagcgggaagaatgcctccaggtgaaaaccgtcaaggcagagaagccaatgacatctcagccaagccctggtggtcagtcttcatgcagcagccaacagtcccccatcagcaactattccaacagtgggctcgagcttcctctgaccgatggaggtagtataggagacctcagtgccatcgatgaaaccccaatcatggactcaaccatttccactgcaaccacagcccttgctttgcaagccaggagaaacccggcagggaccaaatggatggagcacgtaaaactagaaaggctaaaacaagtgaatggaatgtttccgcgactgaaccccattctaccccctaaagcccctgcggtctctcctctcataggaaatggcacacagtccaacaacacctgcagcttgggtgggcccatgacgcttctcccgggcagaagcgacctctctggggtggacgtcactatgctgaacatgctcaacagaagggacagcagcgccagcaccatcagctcggcctacctgagcagccgccgctcctcagggatctcgccctgcttctccagccgccgctccagcgaggcgtcacaggccgagggccggccgcagaacgtgagcgtggccgactcctacgaccccatctccaccgacgcctcgcgccgctccagcgaagccagccagagcgacggcctgcccagcctgctcagcctcacgcccgcccagcagtaccgcctcaaggccaagtacgcggctgccacaggagggccgccgccgacgcccctgcccaacatggagaggatgagcctgaagacgcgcctggcgctgctcggggatgccctcgagcctggcgtggccctgcctccagttcatgccccgaggaggtgcagcgacgggggagcccacggctacgggcggcgccacctgcagccgcacgatgcgctgggccacggcgtgaggagggccagcgacccggtgcggacaggctccgagggcctggccctgcctcgtgtgccgcgcttcagcagcctcagcagctgcaaccccccggcgatggccacgtccgcggagaagcgcagtctcgtgcttcagaattacacgcggcccgagggcggccagtcccgaaacttccactcgtccccctgtcctcccagcatcaccgagaacgtcaccctggagtccctgaccatggacgctgatgccaacctgaacgatgaggatttcctgccggacgacgtggtgcagtatttaaattcccagaaccaagcagggtacgagcagcacttccccagcgccctcccggacgacagcaaagtgccccacgggcccggtgactttgacgcgcccgggctgccagacagccacgctggccagcagttccatgccctcgagcagccctgccccgagggcagcaaaaccgacctgcccattcagtggaacgaagtcagctccggaagcgccgacctgtcctcctccaagctcaagtgtgggccgcggcccgctgtgccgcagactcgcgcctttgggttctgcaacggcatggtcgtccacccgcagaaccccttgaggagcgggcctgctgggggctatcagaccctcggggagaacagcaacccctacggtggcccagagcacttgatgctccacaacagccccggaagtggcaccagtggaaacgccttccatgaacagccctgtaaggccccgcagtatgggaactgtctcaacaggcagccagtggcccctggtgcactcgacggtgcctgtggtgccgggattcaagcctcaaagctgaagagcacccccatgcaagggagcgggggccagctgaatttcggcctgccggtagcgccaaatgagtcagctggcagcatggtgaatggcatgcagaaccaggacccagtgggacaggggtacctggctcaccagctcctcggcgacagcatgcagcacccgggggcaggccgccccggtcagcagatgcttgggcagattagtgctacctcacacatcaacatctaccaagggccagagagctgcctgccaggggctcacggcatgggcagccagccgtcaagcttggcagttgtcaggggctaccagccatgtgccagctttgggggcagcaggcgccaggctatgccgagggacagccttgctctgcagtcaggacagctcagtgacacaagtcagacctgcagggtgaatggtatcaagatggagatgaaagggcagccccatccgctgtgctctaatctgcagaattactctggtcagttctatgaccaaaccgtgggcttcagtcagcaagacacgaaagctggttcattctctatttcagacgccagctgcctgctacaggggaccagcgccaaaaactctgagttactttccccaggtgctaatcaggtgacaagcacagtggacagcctcgacagccatgacctggaaggggtacagattgacttcgatgccatcatagacgatggggaccactccagcctgatgtcgggggccctgagcccaagtatcattcagaacctttcccatagctcctcccgcctcaccacgcctcgggcgtccctcccattcccagcgctgtccatgagcaccaccaacatggctatcggggacatgagttctttgctgacctccctagcggaagaaagcaaattccttgcagttatgcaataggctttaggaaaaaaagactgcaaccaacggaaatcaataggagttgaagagattaaactgactttgttttggctgtttttttagttctgtatgtattttagcaatctcatctcacctaactgagatgtgtttcaattatattccttttatggaaaaggactctgaaaaaccctaaagtattctagggagaaactgtcttccatttcagttttgaatcagtattgttacactcaaaccaccctctttttaaaaaaaaa

SEQ ID NO: 429 - DNA, 271 bp, Homo sapiens
  3' terminal sequence. interleukin enhancer binding factor 1 (ILF1) gene.
aggagacttgttttactcagagtggaaaattttgccagggacaaagtcaacacaaagaaacaaacaacaaaaaatagccagaaagagaacagttaagtgcagctcggtgagtcccggcagttccttcccggcactggctcgtccctgggttctcaaggttccatgcggccacagcgtccgtccacctgtccacgcgagccacatgctgaaatggaggtggataaaattcatcaggcagctgctgtaacacggaaatgtgcagatgccagag

SEQ ID NO: 430 - DNA, 193 bp, Homo sapiens
  5' terminal sequence. Similar to Retinoblastoma-like protein 2, sw|Q08999|RBL2_HUMAN.
  modified_base (12): a, t, c or g
  modified_base (34): a, t, c or g
  modified_base (35): a, t, c or g
  modified_base (46): a, t, c or g
  modified_base (67): a, t, c or g
  modified_base (71): a, t, c or g
  modified_base (86): a, t, c or g
  modified_base (96): a, t, c or g
  modified_base (98): a, t, c or g
  modified_base (99): a, t, c or g
  modified_base (107): a, t, c or g
  modified_base (121): a, t, c or g
  modified_base (123): a, t, c or g
  modified_base (134): a, t, c or g
  modified_base (135): a, t, c or g
  modified_base (138): a, t, c or g
  modified_base (140): a, t, c or g
  modified_base (145): a, t, c or g
  modified_base (146): a, t, c or g
  modified_base (152): a, t, c or g
  modified_base (154): a, t, c or g
  modified_base (156): a, t, c or g
  modified_base (157): a, t, c or g
  modified_base (164): a, t, c or g
  modified_base (171): a, t, c or g
  modified_base (181): a, t, c or g
  modified_base (193): a, t, c or g
tgtctacatttncccacataaaaatgaaacaatnntttctcctcgngaaaagattttatattacttnagcnaaagtccttcaaagngactgagcgnanntaatagtntgatacgcataggngnaactcctactnnaangngcggnnttcttntngnngatggcngtgaatncactgcaaanagcatttgcccn

SEQ ID NO: 431 - DNA, 184 bp, Homo sapiens
  3' terminal sequence. Homo sapiens CD2 antigen (p50).
  modified_base (24): a, t, c or g
  modified_base (47): a, t, c or g
  modified_base (104): a, t, c or g
  modified_base (115): a, t, c or g
  modified_base (153): a, t, c or g
agtcaaagcttttatttcactttnactcacaggatggggggcaagtntccaccagggcacataagaaactccagagtctcttaagcagataggctgcttgtagngagacccaggnacaccaatcacttgatttatcgcatctacacatgaccngagaggggacaagaaatctctaagttttctg

SEQ ID NO: 432 - DNA, 242 bp, Homo sapiens
  5' terminal sequence. Similar to NM_022641 Homo sapiens chorionic somatomammotropin hormone 1 (placental lactogen) (CSH1)
  modified_base (151): a, t, c or g
  modified_base (157): a, t, c or g
  modified_base (161): a, t, c or g
  modified_base (166): a, t, c or g
  modified_base (177): a, t, c or g
  modified_base (180): a, t, c or g
  modified_base (183): a, t, c or g
  modified_base (189): a, t, c or g
  modified_base (195): a, t, c or g
  modified_base (202): a, t, c or g
  modified_base (239): a, t, c or g
attcggcacgatgactggccagggtataaaaagggcccacaagagaccggctctaggatcccaaggcccaactccccgaaccactcagggtcctgtggcagctcacctagtggcaatggctccaggctcccggaacgtccctgatcctggnttttgncctnctctnactgccctggnttnaanaagctngtgccntccaaancgttccgttatccagggtttttgaccacgctatgctncaa

SEQ ID NO: 433 - DNA, 329 bp, Homo sapiens
  5' terminal sequence. Homo sapiens plasminogen activator (PLAT)
  modified_base (57): a, t, c or g
  modified_base (82): a, t, c or g
  modified_base (159): a, t, c or g
  modified_base (264): a, t, c or g
  modified_base (278): a, t, c or g
aacagtcaccgacaacatgctgtgtgctggagacactcggagcggcgggccccaggnaaacttgcacgacgcctgccagggnatttcgggaggccccctggtgtgtctgaacgatggccgcatgactttggtgggcatcatcagctggggcctgggctntggacagaaggatgtcccgggtgtgtacaccaaggttaccaactacctagactggattcgtgacaacatgcgaccgtgaccaggaacacccgactcctcaaaagnaaatgagatcccgnctcttcttcttcagaagacactgcaaaggcgcagtgcttctctacagactt

SEQ ID NO: 434 - DNA, 247 bp, Homo sapiens
  3' terminal sequence. Homo sapiens plasminogen activator (PLAT)
  modified_base (14): a, t, c or g
  modified_base (15): a, t, c or g
  modified_base (16): a, t, c or g
  modified_base (17): a, t, c or g
  modified_base (29): a, t, c or g
  modified_base (42): a, t, c or g
  modified_base (71): a, t, c or g
  modified_base (138): a, t, c or g
  modified_base (144): a, t, c or g
  modified_base (182): a, t, c or g
  modified_base (192): a, t, c or g
  modified_base (194): a, t, c or g
  modified_base (198): a, t, c or g
  modified_base (217): a, t, c or g
  modified_base (220): a, t, c or g
aaatatatctgaannnnttaagtacagtntaaaacagggttntggcaacagaaagtaaaaactaacatggnttgctataaatatgctgaagcctagttgttcaaatgatacaattctctcatgctactctaaagtttntaaagnaaaagggtttacactttacacactgtacacaaaggggntaccttctgngngccngggagtggggaaagggganggngacttgacgtcaagggtgcttttgagg

SEQ ID NO: 435 - DNA, 63 bp, Homo sapiens
  5' terminal sequence. Homo sapiens aminoacylase 1 (ACY1).
  modified_base (8): a, t, c or g
ccgccagnacctgcgtatccgcactgttcagcccaagcctgactatggagctgctgtggcttt

SEQ ID NO: 436 - DNA, 190 bp, Homo sapiens
  3' terminal sequence. Homo sapiens aminoacylase 1 (ACY1).
  modified_base (11): a, t, c or g
  modified_base (25): a, t, c or g
  modified_base (30): a, t, c or g
  modified_base (53): a, t, c or g
  modified_base (118): a, t, c or g
  modified_base (119): a, t, c or g
  modified_base (129): a, t, c or g
  modified_base (154): a, t, c or g
  modified_base (161): a, t, c or g
  modified_base (166): a, t, c or g
  modified_base (175): a, t, c or g
  modified_base (182): a, t, c or g
gaagaggaggnccttggcactggtnggganggaagccccaggggaaaaggttnaggagtcccagggctcagctgtcactgggcagggcaggcacactggcagggccaggcagcaggcnngtatatatgnccaccccacggaggaacacagcctnatgcagncgttnatcgtggtngtgcagnagcacagg

SEQ ID NO: 437 - DNA, 176 bp, Homo sapiens
  3' terminal sequence. Homo sapiens E74-like factor 1 (ets domain transcription factor) (ELF1)
  modified_base (50): a, t, c or g
  modified_base (141): a, t, c or g
cccttaggctgttctggtgatgaggctcccggtgagtctgcatatttttnttgcacctgctgtgtttccatcacttcaggaatcccatctaatgtgacggacacatgggtgactggggcaacaaccatgtcatcttcaggngaactaaatatattattatttatccggttttcatc

SEQ ID NO: 438 - DNA, 465 bp, Homo sapiens
  5' terminal sequence. Homo sapiens selectin P, granule membrane protein CD62, SELP
  modified_base (1): a, t, c or g
  modified_base (175): a, t, c or g
  modified_base (433): a, t, c or g
  modified_base (458): a, t, c or g
nggaacatatggagtttttacaaacgctgcatttgacccgagtccttaagagacctgtccttttcctggtctcctcattcagcctccatatgatcctgttgtgaacatcaagtttcctgctacactggacttaactataatgcatttgctgcaggtttccataaacacccatgantcaaagacatggaattaccttagattagctctggaccagcctgttggacccgctctggaccaaccctgtttcctgagtttgggattgtggtacaatctcaaattctcaacctaccaccccttcctgtcccacctcttctcttcctgtaacacaagccacagaagccaggagcaaatgtttctgcagtagtctctgtgctttgactcacctgttacttgaaataccagtgaaccaaagagactggagcatctggacttnacaagaagaccagacttgtggaganattaaaa

SEQ ID NO: 439 - DNA, 396 bp, Homo sapiens
  3' terminal sequence. Homo sapiens selectin P, granule membrane protein CD62, SELP
  modified_base (12): a, t, c or g
  modified_base (20): a, t, c or g
  modified_base (25): a, t, c or g
  modified_base (28): a, t, c or g
  modified_base (34): a, t, c or g
  modified_base (42): a, t, c or g
  modified_base (82): a, t, c or g
  modified_base (103): a, t, c or g
  modified_base (106): a, t, c or g
  modified_base (168): a, t, c or g
  modified_base (195): a, t, c or g
  modified_base (222): a, t, c or g
  modified_base (225): a, t, c or g
  modified_base (252): a, t, c or g
  modified_base (278): a, t, c or g
  modified_base (279): a, t, c or g
  modified_base (289): a, t, c or g
  modified_base (299): a, t, c or g
  modified_base (304): a, t, c or g
  modified_base (341): a, t, c or g
  modified_base (356): a, t, c or g
  modified_base (357): a, t, c or g
  modified_base (384): a, t, c or g
  modified_base (385): a, t, c or g
  modified_base (392): a, t, c or g
gaaaatcctttnaattacgnatttnaanattggnctttgggncatttgagggacagtgactgggggcaggaaggcccacggngacatgtggccttctagcttnatncttggccttctgcagcctctggggccatccagaggactctctggaagcctcagagcagaggnccaagaggcctcatcaacagcaaccantggagactccagaagatgctacagganttnctcccaattagagatgccacctgtttnccaacaaagtggagaaaaccttcctnnaatcaaaaantaaagaggtntttcnatttctccacagtttggcctccttgtgagtcagatgntccagtctctttggnncactggtatttcaagtaacaggtgagnnaaagganagag

SEQ ID NO: 440 - DNA, 337 bp, Homo sapiens
  5' terminal sequence. Human interleukin 3 receptor (hIL-3Ra).
  modified_base (237): a, t, c or g
  modified_base (282): a, t, c or g
  modified_base (326): a, t, c or g
  modified_base (335): a, t, c or g
aaaggctcagcagttgacctgggaccttaacagaaatgtgaccgatatcgagtgtgttaaagacgccgactattctatgccggcagtgaacaatagctattgccagtttggagcaatttccttatgtgaagtgaccaactacaccgtccgagtggccaaccccccattctccacgtggatcctcttccctgagaacagtgggaagcctttggcaggtgcggagaatctgacctgctngattcatgacgttgatttcttgagctgcagctgggcggtagggcncggggccccgcgggacgtccagtacgacctgtacttgaacgttnccaacaggngt

SEQ ID NO: 441 - DNA, 104 bp, Homo sapiens
  3' terminal sequence. Human interleukin 3 receptor (hIL-3Ra).
  modified_base (23): a, t, c or g
  modified_base (27): a, t, c or g
  modified_base (36): a, t, c or g
  modified_base (39): a, t, c or g
  modified_base (41): a, t, c or g
  modified_base (43): a, t, c or g
  modified_base (49): a, t, c or g
  modified_base (55): a, t, c or g
  modified_base (58): a, t, c or g
  modified_base (64): a, t, c or g
  modified_base (69): a, t, c or g
  modified_base (71): a, t, c or g
  modified_base (76): a, t, c or g
  modified_base (80): a, t, c or g
  modified_base (86): a, t, c or g
  modified_base (91): a, t, c or g
ttcccgcctcccagaccaccagnttgncgttttggnagntntnaccganggggtnttncatgtnagggntncgggnaaanagtttntgaancaccagaaacctt

SEQ ID NO: 442 - DNA, 223 bp, Homo sapiens
  5' terminal sequence. Human tumor protein p53 (Li-Fraumeni syndrome) (TP53)
  modified_base (93): a, t, c or g
  modified_base (96): a, t, c or g
  modified_base (137): a, t, c or g
  modified_base (190): a, t, c or g
aagcaatggatgatttgatgctgtccccggacgatattgaacaatggttcactgaagacccaggtccagatgaagctcccagaatgccagagntgnctccccgcgtggcccctgcaccagcagctcctacaccggcngcccctgcaccagccccctcctggcccctgtcatcttctgtcccttcccaganaacctaccagggcagctacggtttccgtctggg

SEQ ID NO: 443 - DNA, 223 bp, Homo sapiens; identical to SEQ ID NO: 442
  5' terminal sequence. Tumor protein p53 (Li-Fraumeni syndrome) (TP53) gene.
  modified_base (93): a, t, c or g
  modified_base (96): a, t, c or g
  modified_base (137): a, t, c or g
  modified_base (190): a, t, c or g

SEQ ID NO: 444 - DNA, 343 bp, Homo sapiens; identical to SEQ ID NO: 118
  3' terminal sequence.
  v-erb-b2 avian erythroblastic leukemia viral oncogene homolog 2 (neuro/glioblastoma derived oncogene homolog) (ERBB2) gene.
  modified_base (17): a, t, c or g
  modified_base (18): a, t, c or g

SEQ ID NO: 445 - DNA, 309 bp, Homo sapiens
  3' terminal sequence.
  zinc finger protein 144 (Mel-18) (ZNF144) gene.
  modified_base (24): a, t, c or g
  modified_base (147): a, t, c or g
  modified_base (177): a, t, c or g
  modified_base (183): a, t, c or g
  modified_base (216): a, t, c or g
  modified_base (220): a, t, c or g
  modified_base (225): a, t, c or g
  modified_base (227): a, t, c or g
  modified_base (228): a, t, c or g
  modified_base (241): a, t, c or g
  modified_base (253): a, t, c or g
  modified_base (259): a, t, c or g
  modified_base (261): a, t, c or g
  modified_base (269): a, t, c or g
  modified_base (273): a, t, c or g
  modified_base (280): a, t, c or g
  modified_base (287): a, t, c or g
  modified_base (294): a, t, c or g
  modified_base (305): a, t, c or g
ccgccccccacccccaaggtgganagagctggggaaagtagaagaggtggaaaaaagggcccagaaaaagtggaaggagtggagaggcttagctggaagaagggagagggtccctggcctcaagttaaggggggcacgggagcgccnttgacagtcatcttgcgccccctgctggtngaaganggtttcttcaggcagttcaagctacccccgttngcanctttngnngccccacttgctntcgaaggggganttgggnangtagggtnggtngcttgangcccatnggaactnggaaaaccatnggat

SEQ ID NO: 446 - DNA, 268 bp, Homo sapiens
  3' terminal sequence.
  MAP/microtubule affinity-regulating kinase 3 (MARK3) gene.
  modified_base (100): a, t, c or g
  modified_base (134): a, t, c or g
  modified_base (163): a, t, c or g
  modified_base (203): a, t, c or g
  modified_base (211): a, t, c or g
  modified_base (223): a, t, c or g
attatcttgtgaatctacttagaaaaacacacacaagcaatgttcacaactataaatttaaaccttttgcactaaaaaaacacaaaacaacaaacacaanaccacaggcatgaactgtaaacctgtattaactntgaactggtcttaaggttaattcttagcngtcattcagtattttcctccttggcaactgtaatgttttngcaccggntgatctcccgcngggggtactagtaatgactggctgcccgtgtagggagatgcttcc

SEQ ID NO: 447 - DNA, 169 bp, Homo sapiens
  5' terminal sequence.
  MAP/microtubule affinity-regulating kinase 3 (MARK3) gene.
  modified_base (91): a, t, c or g
  modified_base (97): a, t, c or g
  modified_base (104): a, t, c or g
  modified_base (106): a, t, c or g
  modified_base (117): a, t, c or g
  modified_base (133): a, t, c or g
  modified_base (140): a, t, c or g
  modified_base (146): a, t, c or g
  modified_base (152): a, t, c or g
  modified_base (155): a, t, c or g
gaacactgatggaaatgtatagaataatatttaggcaataacgtctgcatcttctaaatcatgaaattaaagtctgaggacgagagcacgnctgggngcgaaantntgccttttttntacggatgcactacantaaagangtgcancctatncgncccctgccctactt

SEQ ID NO: 448 - DNA, 393 bp, Homo sapiens
  3' terminal sequence.
  EST N68536 MAX-interacting protein 1 (MXI1)  gene.
  modified_base (334): a, t, c or g
  modified_base (344): a, t, c or g
  modified_base (386): a, t, c or g
aagtaattaagggtagttaaattatttaaagtatacaaagtccaaacagccaggggtaaggtctccaagaggccttcccagggtaagggagagggccacaagggaaccttggagtttgaaagacaaagggaacacatgacatcaaagtgcaggctagaaatttcacttagaagaaaataacattactgaaaatattcgtaagagtaacaatagcacatgcacagtgggactgtgaggaagagagagactgcctgtaggaaaatggaagcaaatctttacattaaaatgagacaagtgctgaacttactatgttaactatgatagtgtgtctacnatagatatcncgatggttaaaagctggtaaaaggtaatggttctcaaaaccnaaaatag

SEQ ID NO: 449 - DNA, 217 bp, Homo sapiens
  5' terminal sequence.
  EST R81126 lymphotoxin beta receptor (LTBR) gene.
  modified_base (6): a, t, c or g
  modified_base (66): a, t, c or g
  modified_base (171): a, t, c or g
  modified_base (206): a, t, c or g
  modified_base (213): a, t, c or g
ttaccntggtatctcctactgtagtatgaggaagaatggctgttaatgtattttttgaattctggnctcacctttgtctcagctaaatgtagccgcatccgggacacagtttgtgccacatgtgccgagaattcctacaacgagcactggaactacctgaccatctgccanctgtgccgcccctgtgacccagtgatgggcctcgnctgagantgcc

SEQ ID NO: 450 - DNA, 157 bp, Homo sapiens
  5' terminal sequence
  (POU2F2) gene.
  modified_base (1): a, t, c or g
  modified_base (13): a, t, c or g
  modified_base (94): a, t, c or g
  modified_base (97): a, t, c or g
  modified_base (127): a, t, c or g
nattcggcaacgnggaaaggaaagaaactaaccaacaaaagagaaaaccaaaaataatcacaacagaaaccagctgccccaaaggaggccagtngtngggacgcagagggtcctcagagcaggagtnacaagggaggaaagaccaaaaaaacaacca

SEQ ID NO: 451 - DNA, 282 bp, Homo sapiens
  5' terminal sequence.
  caspase 4, apoptosis-related cysteine protease (CASP4) (ex CASP1)
  modified_base (211): a, t, c or g
  modified_base (239): a, t, c or g
  modified_base (273): a, t, c or g
gagaatctgacagccagggatatggagtcagcgctgagggcatttgctaccagaccagagcacaagtcctctgacagcacattcttggtactcatgtctcatggcatcctggagggaatctgcggaactgtgcatgatgagaaaaaaccagatgtgctgctttatgacaccatcttccagatattcaacaaccgcaacttgcctcagtctngaaggacaaacccaaggtcatcattgtncagggcttgcagagggtgcaaaccttgggggaantttggggtc

SEQ ID NO: 452 - DNA, 424 bp, Homo sapiens
  5' terminal sequence
  syndecan 1 (SDC1) (ex HRB)
  modified_base (9): a, t, c or g
  modified_base (32): a, t, c or g
  modified_base (281): a, t, c or g
  modified_base (326): a, t, c or g
  modified_base (340): a, t, c or g
  modified_base (357): a, t, c or g
  modified_base (394): a, t, c or g
  modified_base (404): a, t, c or g
  modified_base (416): a, t, c or g
ttgcttttngcaaaactctacttaatccaatnggtttttccctgtacagtagattttccaaatgtaataaactttaatataaagtagtcctgtgaatgccactgccttcgcttcttgcctctgtgctgtgtgtgacgtgaccggacttttctgcaaacaccaacatgttgggaaacttggctcgaatctctgtgccttcgtctttcccatggggaggggattctggttccagggtccctctgtgtatttgcttttttgttttggctgaaattctcctggangtcggtaggttcagccaaggttttataagggctgatgtcaatttnctgtgtttgccaanttccaagccccatcttnctaaatgggcaaaaggaaggtgggatgggccccagcnacagctttgnacccgagggctnttgggtca

SEQ ID NO: 453 - DNA, 435 bp, Homo sapiens; identical to SEQ ID NO: 267
  Itegrin, beta 2 (antigen CD18 (p95), lymphocyte function-associated antigen 1; macrophage antigen 1 (mac-1) beta subunit) (ITGB2)
  modified_base (79): a, t, c or g
  modified_base (383): a, t, c or g
  modified_base (405): a, t, c or g

SEQ ID NO: 454 - DNA, 544 bp, Homo sapiens
  5' terminal sequence
  Protein phosphatase 1, catalytic subunit, alpha isoform (PPP1CA) (ex MGST1)
  modified_base (22): a, t, c or g
  modified_base (40): a, t, c or g
  modified_base (44): a, t, c or g
  modified_base (49): a, t, c or g
  modified_base (57): a, t, c or g
  modified_base (61): a, t, c or g
  modified_base (64): a, t, c or g
  modified_base (82): a, t, c or g
  modified_base (96): a, t, c or g
  modified_base (101): a, t, c or g
  modified_base (111): a, t, c or g
  modified_base (116): a, t, c or g
  modified_base (127): a, t, c or g
  modified_base (154): a, t, c or g
  modified_base (158): a, t, c or g
  modified_base (185): a, t, c or g
  modified_base (197): a, t, c or g
  modified_base (438): a, t, c or g
  modified_base (481): a, t, c or g
  modified_base (544): a, t, c or g
gtgtgaccagacatgcaaccgncatctatggtttctacgnatgnagtgncaagcagnacgnctnacaacatcaaactgtggnaaaaccttcactgnactgncttcaactgncctgncccatcgcggnccatagtggacgtaaaagatcttctgnctgnccacggaggcctgttccccggacctgncagttctatggnagcagattcggcgggatcatgcggcccacagatgtgtcctgtaccaggggcctgctgtgtgacctgctgtggtctgaccctgacaaggacgtgcagggctggggcgagaacgaccgtgggcgtctcttttacctttggagccgaggtggtggccaagttcctccacaagcacgacttggacctcatctgccgagcacaccaggttgtagaagacggctacgagttctttgccaagcggcanttggtgacacttttctcagcttccaactactgttgcgagtttnacaatgcttgcgccatgatgagtgtgacgagaccctatgtgcttttcagatcttaagccgccn

SEQ ID NO: 455 - DNA, 344 bp, Homo sapiens
  3' terminal sequence
  protein phosphatase 2 (formerly 2A), catalytic subunit,alpha isoform (PPP2CA)
  modified_base (32): a, t, c or g
  modified_base (49): a, t, c or g
  modified_base (72): a, t, c or g
  modified_base (78): a, t, c or g
  modified_base (90): a, t, c or g
  modified_base (97): a, t, c or g
  modified_base (117): a, t, c or g
  modified_base (118): a, t, c or g
  modified_base (127): a, t, c or g
  modified_base (136): a, t, c or g
  modified_base (141): a, t, c or g
  modified_base (144): a, t, c or g
  modified_base (156): a, t, c or g
  modified_base (158): a, t, c or g
  modified_base (159): a, t, c or g
  modified_base (179): a, t, c or g
  modified_base (192): a, t, c or g
  modified_base (200): a, t, c or g
  modified_base (210): a, t, c or g
  modified_base (212): a, t, c or g
  modified_base (218): a, t, c or g
  modified_base (225): a, t, c or g
  modified_base (234): a, t, c or g
  modified_base (244): a, t, c or g
  modified_base (247): a, t, c or g
  modified_base (255): a, t, c or g
  modified_base (258): a, t, c or g
  modified_base (269): a, t, c or g
  modified_base (276): a, t, c or g
  modified_base (285): a, t, c or g
  modified_base (286): a, t, c or g
  modified_base (290): a, t, c or g
  modified_base (292): a, t, c or g
  modified_base (297): a, t, c or g
  modified_base (298): a, t, c or g
  modified_base (301): a, t, c or g
  modified_base (303): a, t, c or g
  modified_base (307): a, t, c or g
  modified_base (313): a, t, c or g
  modified_base (315): a, t, c or g
  modified_base (319): a, t, c or g
  modified_base (326): a, t, c or g
  modified_base (327): a, t, c or g
  modified_base (328): a, t, c or g
  modified_base (331): a, t, c or g
actgcggtgagagccagcggccagcgccaccncaacagccgccagaagnacacgaggaaccggcggcggcgngtgcgngtaggcccgtgngcggtgncggcgcgggaggagccgganncagccggcnggggcgggnggcancanggacgagaaggngnncaccaaggagctggaccagnggaacgagcagcngaacgagngcaagcagcngnccgagncccaggncaagagccncagcgagaangcnaaagaaanccngacaaaagaanccaacgngcaagaggnncgangnccagnnacngnccgnggagangngcangggcaannncangaacccatggaac

SEQ ID NO: 456 - DNA, 514 bp, Homo sapiens
  5' terminal sequence
  S100 calcium-binding protein A11 (calgizzarin) (S100A11)
  modified_base (390): a, t, c or g
  modified_base (418): a, t, c or g
  modified_base (436): a, t, c or g
  modified_base (459): a, t, c or g
  modified_base (470): a, t, c or g
  modified_base (496): a, t, c or g
  modified_base (502): a, t, c or g
cagcctcccgcgcctcgctcagctccaacatggcaaaaatctccagccctacagagactgagcggtgcatcgagtccctgattgctgtcttccagaagtatgctggaaaggatggttataactacactctctccaagacagagttcctaagcttcatgaatacagaactagctgccttcacaaagaaccagaaggaccctggtgtccttgaccgcatgatgaagaaactggacaccaacagtgatggtcagctagatttctcagaatttcttaatctgattggtggcctagctatggcttgccatggactccttcctcaaggctgtcccttcccagaagcgggacctggagggaccccttgggccctgggcctttcaaacccaccccctnttcctttccagcctttctgttcatcatnttccacagcccacccttncctggaggcacattaaccacctnatggtagggtnccaactggtcattagttattaaaggnaatgtnaattttttttaa

SEQ ID NO: 457 - DNA, 359 bp, Homo sapiens
  5' terminal sequence
  Granzyme A (granzyme 1, cytotoxic T-lymphocyte-associated serine esterase 3) (GZMA)
  modified_base (231): a, t, c or g
  modified_base (244): a, t, c or g
  modified_base (345): a, t, c or g
  modified_base (356): a, t, c or g
gctggacgtcatcaacaagcattcattcaacaacttccgcctgcgagtggggttgaaccatggacccgtagtagctggagttattggggcccagaagccgcaatatgacatttggggcaacacagtgaacgtggccagccgcatggagagtacaggagtccttggcaaaatccaagtgactgaggagacagcatgggccctacagtccctgggctacacctgctacagccnggggtgtcatcanggtgaaaggcaaagggcagctctgcacctacttcctgaacacagacttgacacgaactggacctccttcagctaccctaggctgagattgcactcgccttnctaagaacctnaat

SEQ ID NO: 458 - DNA, 1251 bp, Homo sapiens
  3' terminal sequence
  endothelin 1 (EDN1)
ggagctgtttacccccactctaataggggttcaatataaaaagccggcagagagctgtccaagtcagacgcgcctctgcatctgcgccaggcgaacgggtcctgcgcctcctgcagtcccagctctccaccaccgccgcgtgcgcctgcagacgctccgctcgctgccttctctcctggcaggcgctgccttttctccccgttaaagggcacttgggctgaaggatcgctttgagatctgaggaacccgcagcgctttgagggacctgaagctgtttttcttcgttttcctttgggttcagtttgaacgggaggtttttgatccctttttttcagaatggattatttgctcatgattttctctctgctgtttgtggcttgccaaggagctccagaaacagcagtcttaggcgctgagctcagcgcggtgggtgagaacggcggggagaaacccactcccagtccaccctggcggctccgccggtccaagcgctgctcctgctcgtccctgatggataaagagtgtgtctacttctgccacctggacatcatttgggtcaacactcccgagcacgttgttccgtatggacttggaagccctaggtccaagagagccttggagaatttacttcccacaaaggcaacagaccgtgagaatagatgccaatgtgctagccaaaaagacaagaagtgctggaatttttgccaagcaggaaaagaactcagggctgaagacattatggagaaagactggaataatcataagaaaggaaaagactgttccaagcttgggaaaaagtgtatttatcagcagttagtgagaggaagaaaaatcagaagaagttcagaggaacacctaagacaaaccaggtcggagaccatgagaaacagcgtcaaatcatcttttcatgatcccaagctgaaaggcaagccctccagagagcgttatgtgacccacaaccgagcacattggtgacagacttcggggcctgtctgaagccatagcctccacggagagccctgtggccgactctgcactctccaccctggctgggatcagagcaggagcatcctctgctggttcctgactggcaaaggaccagcgtcctcgttcaaaacattccaagaaaggttaaggagttcccccaaccatcttcactggcttccatcagtggtaactgctttggtctcttctttcatctggggatgacaatggacctctcagcagaaacacacagtcacattcgaattc

SEQ ID NO: 459 - DNA, 2145 bp, Homo sapiens
  3' terminal sequence
  Protein tyrosine phosphatase, non-receptor type 6 (PTPN6)
cggcagaactgggaccaccgggggtggtgaggcggcccggcactgggagctgcatctgaggcttagtccctgagctctctgcctgcccagactagctgcacctcctcattccctgcgcccccttcctctccggaagcccccaggatggtgaggtggtttcaccgagacctcagtgggctggatgcagagaccctgctcaagggccgaggtgtccacggtagcttcctggctcggcccagtcgcaagaaccagggtgacttctcgctctccgtcagggtgggggatcaggtgacccatattcggatccagaactcaggggatttctatgacctgtatggaggggagaagtttgcgactctgacagagctggtggagtactacactcagcagcagggtgtggtgcaggaccgcgacggcaccatcatccacctcaagtacccgctgaactgctccgatcccactagtgagaggtggtaccatggccacatgtctggcgggcaggcagagacgctgctgcaggccaagggcgagccctggacgtttcttgtgcgtgagagcctcagccagcctggagacttcgtgctttctgtgctcagtgaccagcccaaggctggcccaggctccccgctcagggtcacccacatcaaggtcatgtgcgagggtggacgctacacagtgggtggtttggagaccttcgacagcctcacggacctggtggagcatttcaagaagacggggattgaggaggcctcaggcgcctttgtctacctgcggcagccgtactatgccacgagggtgaatgcggctgacattgagaaccgagtgttggaactgaacaagaagcaggagtccgaggatacagccaaggctggcttctgggaggagtttgagagtttgcagaagcaggaggtgaagaacttgcaccagcgtctggaagggcaacggccagagaacaagggcaagaaccgctacaagaacattctcccctttgaccacagccgagtgatcctgcagggacgggacagtaacatccccgggtccgactacatcaatgccaactacatcaagaaccagctgctaggccctgatgagaacgctaagacctacatcgccagccagggctgtctggaggccacggtcaatgacttctggcagatggcgtggcaggagaacagccgtgtcatcgtcatgaccacccgagaggtggagaaaggccggaacaaatgcgtcccatactggcccgaggtgggcatgcagcgtgcttatgggccctactctgtgaccaactgcggggagcatgacacaaccgaatacaaactccgtaccttacaggtctccccgctggacaatggagacctgattcgggagatctggcattaccagtacctgagctggcccgaccatggggtccccagtgagcctgggggtgtcctcagcttcctggaccagatcaaccagcggcaggaaagtctgcctcacgcagggcccatcatcgtgcactgcagcgccggcatcggccgcacaggcaccatcattgtcatcgacatgctcatggagaacatctccaccaagggcctggactgtgacattgacatccagaagaccatccagatggtgcgggcgcagcgctcgggcatggtgcagacggaggcgcagtacaagttcatctacgtggccatcgcccagttcattgaaaccactaagaagaagctggaggtcctgcagtcgcagaagggccaggagtcggagtacgggaacatcacctatcccccagccatgaagaatgcccatgccaaggcctcccgcacctcgtccaaacacaaggaggatgtgtatgagaacctgcacactaagaacaagagggaggagaaagtgaagaagcagcggtcagcagacaaggagaagagcaagggttccctcaagaggaagtgagcggtgctgtcctcaggtggccatgcctcagccctgaccctgtggaagcatttcgcgatggacagactcacaacctgaacctaggagtgccccattcttttgtaatttaaatggctgcatcccccccacctctccctgaccctgtatatagcccagccaggccccaggcagggccaacccttctcctcttgtaaataaagccctgggatcact

SEQ ID NO: 460 - DNA, 2149 bp, Homo sapiens
  3' terminal sequence
  Transcription factor AP-4 (activating enhancer binding protein 4) (TFAP4)
gacctgcaaacacacacacacacacacacacacacacacacacacacacacatacacacgcaccagggcagccgagagacctccctcccgcccctcccatgcccgcctccctcccctcgccgccgccgccgccgccagcatctgggaccggccgattctgcacctccgtccggcgctgccctttgattcggatttccatcttgcattctccggctgatcgcgggacctggctcgtgcagaggaggggggccgatcgctatggagtatttcatggtgcccactcagaaggtgccctctttgcaacatttcaggaaaacagagaaagaagtgataggagggctctgtagccttgccaacattccactaacccccgagactcagcgggaccaggagcggcggattcggcgggagatcgccaacagcaacgagcggagacgcatgcagagcatcaacgcgggattccagtccctcaagaccctcatcccccacacagacggagagaagctcagcaaggcagccattctccagcagacagccgagtacatcttctccctggagcaggagaagaccaggctcttgcagcagaacacacagctcaagcgcttcatccaggagctgagcggctcgtcccccaagcgacggcgggcagaggacaaggacgaaggcataggctccccggacatctgggaggacgagaaggcggaggacctgcggcgggagatgattgagctgcggcagcagctggacaaggagcgctcggtgcgcatgatgctggaggagcaggtgcgctcgctggaggcccacatgtacccggaaaagctcaaggtgattgcgcagcaggtgcagctgcagcagcagcaggaacaggtgaggctgctgcaccaggagaagctggagcgggaacagcagcagctgcggacccagcttctgccccctccggcccccacccaccaccccacggtgatcgtgccagcaccgcctcctcctccctcccaccacatcaatgtcgtcaccatgggcccctcctcggtcatcaactctgtttccacatcccggcaaaatctggacaccatcgtgcaggcaatccagcacatcgagggcacccaggaaaagcaggagctggaggaggagcagcggcgagctgtcatcgtgaagcctgtccgcagctgcccggaggcccccacctctgacaccgcctccgactccgaggcctcagacagtgacgccatggaccagagccgggaggagccgtcgggggacggggagcttccctgactacccccccagccctcctctcccttctgggggctggagggagccggggcagccacagggagagacatgggcgaatgagtgagaaatttttacaaaattacgatgtcatttgggtctcttttatgacctctttttcaatactgtaaatcgacctttgaacgaagccactcaacccgaggtcccggggctggggtgtcgcagagctgtgggagcatcggcaccccagggcggggcctcggccccgggggctggaggaagctgacacggagatgcctggcctctctctgccaaaaagcattttttcctttaaatatgttttttaagaacagggaaaattaaacaaaaccccaggttatttcttccctgcccagagccagcctgggattgtcagccttcaatcccctttccttcctctttttgggttttcttctttctcctttaagcacttacatggttgggggtaagactaggctggggcattctgggggcccggaggtctccgttgcttcttggttggggtttgctgctgctgtgcccccctcccccttccccatctcggcactagaattcgccactctcccaccccccagcccccacctctgcctccaggtctcatcttccaccccaaaaatgtctgtctctctctttttgttttgtttgttgttggttttttatttctttttggtttgctttctgtttttgttttgtttttcttttttttctttcttttttttttttttacaattttgaggtcttcgtgttcaaggagaagctattatattttgttaagaaagtggggagaaaaaaaaccaagaggccaccgtgcctttgtaaagaaacaaaataaagtttgtactttgttttttaaaaaaaa

SEQ ID NO: 461 - DNA, 6478 bp, Homo sapiens
  3' terminal sequence
  Cyclin D2 (CCND2)
agagcgagcaggggagagcgagaccagttttaaggggaggaccggtgcgagtaaggcagccccgaggctctgctcgcccaccacccaatcctcgcctcccttctgctccaccttctctctctgccctcacctctcccccgaaaaccccctatttagccaaaggaaggaggtcaggggaacgctctcccctccccttccaaaaaacaaaaacagaaaaacccttttccaggccggggaaagcaggagggagaggggccgccgggctggccatggagctgctgtgccacgaggtggacccggtccgcagggccgtgcgggaccgcaacctgctccgagacgaccgcgtcctgcagaacctgctcaccatcgaggagcgctaccttccgcagtgctcctacttcaagtgcgtgcagaaggacatccaaccctacatgcgcagaatggtggccacctggatgctggaggtctgtgaggaacagaagtgcgaagaagaggtcttccctctggccatgaattacctggaccgtttcttggctggggtcccgactccgaagtcccatctgcaactcctgggtgctgtctgcatgttcctggcctccaaactcaaagagaccagcccgctgaccgcggagaagctgtgcatttacaccgacaactccatcaagcctcaggagctgctggagtgggaactggtggtgctggggaagttgaagtggaacctggcagctgtcactcctcatgacttcattgagcacatcttgcgcaagctgccccagcagcgggagaagctgtctctgatccgcaagcatgctcagaccttcattgctctgtgtgccaccgactttaagtttgccatgtacccaccgtcgatgatcgcaactggaagtgtgggagcagccatctgtgggctccagcaggatgaggaagtgagctcgctcacttgtgatgccctgactgagctgctggctaagatcaccaacacagacgtggattgtctcaaagcttgccaggagcagattgaggcggtgctcctcaatagcctgcagcagtaccgtcaggaccaacgtgacggatccaagtcggaggatgaactggaccaagccagcacccctacagacgtgcgggatatcgacctgtgaggatgccagttgggccgaaagagagagacgcgtccataatctggtctcttcttctttctggttgtttttgttctttgtgttttagggtgaaacttaaaaaaaaaattctgcccccacctagatcatatttaaagatcttttagaagtgagagaaaaaggtcctacgaaaacggaataataaaaagcatttggtgcctatttgaagtacagcataagggaatcccttgtatatgcgaacagttattgtttgattatgtaaaagtaatagtaaaatgcttacaggaaaacctgcagagtagttagagaatatgtatgcctgcaatatgggaacaaattagaggagactttttttttcatgttatgagctagcacatacacccccttgtagtataatttcaaggaactgtgtacgccatttatggcatgattagattgcaaagcaatgaactcaagaaggaattgaaataaggagggacatgatggggaaggagtacaaaacaatctctcaacatgattgaaccatttgggatggagaagcacctttgctctcagccacctgttactaagtcaggagtgtagttggatctctacattaatgtcctcttgctgtctacagtagctgctacctaaaaaaagatgttttattttgccagttggacacaggtgattggctcctgggtttcatgttctgtgacatcctgcttcttcttccaaatgcagttcattgcagacaccaccatattgctatctaatggggaaatgtagctatgggccataaccaaaactcacatgaaacggaggcagatggagaccaagggtgggatccagaatggagtcttttctgttattgtatttaaaagggtaatgtggccttggcatttcttcttagaaaaaaactaatttttggtgctgattggcatgtctggttcacagtttagcattgttataaaccattccattcgaaaagcactttgaaaaattgttcccgagcgatagatgggatggtttatgcaagtcatgctgaatactcctcccctcttctcttttgccccctcccttcctgcccccagtctgggttactcttcgcttctggtatctggcgttctttggtacacagttctggtgttcctaccaggactcaagagacaccccttcctgctgacattcccatcacaacattcctcagacaagcctgtaaactaaaatctgttaccatctgatggcacagaaggatcttaattcccatctctatacttctcctttggacatggaaagaaaagttattgctggtgcaaagatagatggctgaacatcagggtgtggcattttgttcccttttccgttttttttttttttattgttgttgttaattttattgcaaagttgtattcagcgtacttgaatttttcttcctctccacttcttagaggcattcagttagcaaagaggttggagcaacaactttttttttttttttttgcacaattgtaattgacaggtaatgaagctatttgttaaaatatttgcctttttaagtaaaaaagaaaaatcagaacagggctatttgaagaattattttatacacagattctgccttgtttcatagtatgagggttgaagacggaaaacaatctaagggtctctcatttttttaattttgttttgttcagtttggtttttttttttttttgcgctgctaagaagctaaagtcatccatccttattcacgttgacagtacctagctgtaatgtttcacagagtgtgctgctattttataaacatttttataatatattattttactgcttaaattccaagtcctgaagtagatggttgagatatgagttcttcgtactggaaaagcccttccgtagtttgttttcttctggtagcatattcatggttgtttttttttttcttttttggttttttggttttttttttttcctctgatcacattcttcaaagacggagtattcttacctcaggtttactggacaaaatcaataactacaaaaggcaatgattcacgcttttgttttcataatacctcacaaccgtacagtttctgcttgggagcccattcgcatgaggaatacagaagcagtgtgagcagggctgactccctctcaggtggaaggcagggcggtctcactcccagggacctttttggtcatggaggccatcgggctcccagttagaccctggtatcctcatcatgatggaaaaaatacattgaaccaagggatcctccctccccttcaaggcagacgttcagtacaaacatttatgcggtaggctcagatgtcgtaatttgcacttaggtaccaggtgtcaggaaacagactaaaaagaattccaccaggctgtttggagatcctcatcttggagctttttcaaaagcggggcttcatctgcaaagggccctttcatcttgaagtttttcccctccgtctttcccctcccctggcatggacaccttgtgtttaggatcatctctgcaggtttcctaggtctgaatctgcgagtagatgaacctgcagcaagcagcgtttatggtgcttccttctccctcctctgtctcaaactgcgcaggcaagcactatgcaagcccaggccctctgctgagcggtactaaacggtcgggttttcaatcacactgaattggcaggataagaaaaataggtcagataagtatgggatgatagttgaagggaggtgaagaggctgcttctctacagaggtgaaattccagatgagtcagtctcttgggaagtgtgtttagaagggttcaggactttgtgagttagcatgaccctaaaattctaggggatttctggtgggacaatgggtggtgaattttgaagttttggagagggaagtggagcagccagcaagtaagctagccagagttttctcaagagccagctttgctcagcacactctcctgggccccaaggagtcccacggaatggggaaagtgggaaccctggagttcttgggaatcttggagcctaaagagaaaccgaggtgcaaattcatttcatggtgactgacccttgagcttaaacagaagcagcaaatgaaagaaccggacaaataaggaagggcacaagcctacccgactctatttacagtctgtaactttccactcttcctgtagtcccgaggcccctgggtccttctagcttttctctttcccatccttggggccttgtgtgatgatgggtgtggggctgccgatgggaaagtcgggggttgttaggcttttctgcctgctcctgcttaaacacaagaaggaatcctggattttgccctctccttagctcttagtctctttggtaggagttttgttccagaggagctctcccccttggatttgaacttgctctttttgttgttgttgttctttctcttctttttcttacctcccactaaaggggttccaaattatcctggtctttttctaccttgttgtgtttctatctcgtctttacttccatctgtttgtttttttctccatcagtgggggccgagttgttcccccagcctgccaaattttgatccttcccctcttttggccaaatcctagggggaagaaatcctagtatgccaaaaatatatgctaagcataattaaactccatgcgggtccataacagccaagaagcctgcaggagaaagccaagggcagttccctccgcagaacaccccatgcgtgctgagaggcgagctccttgaagaaggggctgttcttccaggaggccttattttgaactgcctcaggaccccactggagagcacagcatgccttactactgggtcatccttggtctatgtgctctgtactggaggctctgttctgcctcttatcagccaggtcaggggcacacatggcttaagtgacaaagccagaggagaagacaaccctgacagcatcacgctgcatcccattgctagcaggattggcaactcttcagacggagctgcgcttccctgcagtctagcacctctagggcctctccagactgtgccctgggagctctgggactgaaaggttaagaacataaggcaggatcagatgactctctccaagagggcaggggaattttctctccatgggccacaggggacagggctgggagaagaaatagacttgcaccttatgtcatgtaaataattgattttctagttcaagaagataatattggtagtgtgggaattggaggtaggaaggggaggaagtctgagtaagccagttggcttctaagccaaaaggattcctctttgtttatctctgagacagtccaaccttgagaatagctttaaaagggaaattaatgctgagatgataaagtccccttaagccaacaaaccctctgtagctatagaatgagtgcaggtttctattggtgtggactcagagcaatttacaagagctgttcatgcagccatccatttgtgcaaaatagggtaagaagattcaagaggatatttattacttcctcataccacatggcttttgatgattctggattctaaacaacccagaatggtcatttcaggcacaacgatactacattcgtgtgtgtctgcttttaaacttggctgggctatcagaccctattctcggctcaggttttgagaagccatcagcaaatgtgtacgtgcatgctgtagctgcagcctgcatcccttcgcctgcagcctactttggggaaataaagtgccttactgactgtagccattacagtatccaatgtcttttgacaggtgcctgtccttgaaaaacaaagtttctatttttatttttaattggtttagttcttaactgctggccaactcttacatccccagcaaatcatcgggccattggattttttccattatgttcatcacccttatatcatgtacctcagatctctctctctctcctctctctcagttatatagtttcttgtcttggactttttttttcttttctttttctttttttttttgctttaaaacaagtgtgatgccatatcaagtccatgttattctctcacagtgtactctataagaggtgtgggtgtctgtttggtcaggatgttagaaagtgctgataagtagcatgatcagtgtatgcgaaaaggtttttaggaagtatggcaaaaatgttgtattggctatgatggtgacatgatatagtcagctgccttttaagaggtcttatctgttcagtgttaagtgatttaaaaaaataataacctgttttctgactagtttaaagatggatttgaaaatggttttgaatgcaattaggttatgctatttggacaataaactcaccttgacct

SEQ ID NO: 462 - DNA, 3490 bp, Homo sapiens
  3' terminal sequence
  Junction plakoglobin (JUP)
cgccagagtccggagcagccgccgcccgaccgcgccgagctcagttcgctgtccgcgccggctcccaccccggcccgaccccgacccggcccggtcaggccccatactcagtagccacgatggaggtgatgaacctgatggagcagcctatcaaggtgactgagtggcagcagacatacacctacgactcgggtatccactcgggcgccaacacctgcgtgccctccgtcagcagcaagggcatcatggaggaggatgaggcctgcgggcgccagtacacgctcaagaaaaccaccacttacacccagggggtgccccccagccaaggtgacctggagtaccagatgtccacaacagccagggccaaacgggtgcgggaggccatgtgccctggtgtgtcaggcgaggacagctcgcttctgctggccacccaggtggaggggcaggccaccaacctgcagcgactggccgagccgtcccagctgctcaagtcggccattgtgcatctcatcaactaccaggacgatgccgagctggccactcgcgccctgcccgagctcaccaaactgctcaacgacgaggacccggtggtggtgaccaaggcggccatgattgtgaaccagctgtcgaagaaggaggcgtcgcggcgggccctgatgggctcgccccagctggtggccgctgtcgtgcgtaccatgcagaataccagcgacctggacacagcccgctgcaccaccagcatcctgcacaacctctcccaccaccgggaggggctgctcgccatcttcaagtcgggtggcatccctgctctggtccgcatgctcagctcccctgtggagtcggtcctgttctatgccatcaccacgctgcacaacctgctcctgtaccaggagggcgccaagatggccgtgcgcctggccgacgggctgcaaaagatggtgcccctgctcaacaagaacaaccccaagttcctggccatcaccaccgactgcctgcagctcctggcctacggcaaccaggagagcaagctgatcatcctggccaatggtgggccccaggccctcgtgcagatcatgcgtaactacagttatgaaaagctgctctggaccaccagtcgtgtgctcaaggtgctatccgtgtgtcccagcaataagcctgccattgtggaggctggtgggatgcaggccctgggcaagcacctgaccagcaacagcccccgcctggtgcagaactgcctgtggaccctgcgcaacctctcagatgtggccaccaagcaggagggcctggagagtgtgctgaagattctggtgaatcagctgagtgtggatgacgtcaacgtcctcacctgtgccacgggcacactctccaacctgacatgcaacaacagcaagaacaagacgctggtgacacagaacagcggtgtggaggctctcatccatgccatcctgcgtgctggtgacaaggacgacatcacggagcctgccgtctgcgctctgcgccacctcactagccgccaccctgaggccgagatggcccagaactctgtgcgtctcaactatggcatcccagccatcgtgaagctgctcaaccagcccaaccagtggccactggtcaaggcaaccatcggcttgatcaggaatctggccctgtgcccagccaaccatgccccgctgcaggaggcagcggtcatcccccgcctcgtccaactgctggtgaaggcccaccaggatgcccagcgccacgtagctgcaggcacacagcagccctacacggatggtgtgaggatggaggagattgtggagggctgcaccggagcactgcacatcctcgcccgggaccccatgaaccgcatggagatcttccggctcaacaccattcccctgtttgtgcagctcctgtactcgtcggtggagaacatccagcgcgtggctgccggggtgctgtgtgagctggcccaggacaaggaggcggccgacgccattgatgcagagggggcctcggccccactcatggagttgctgcactcccgcaacgagggcactgccacctacgctgctgccgtcctgttccgcatctccgaggacaagaacccagactaccggaagcgcgtgtccgtggagctcaccaactccctcttcaagcatgacccggctgcctgggaggctgcccagagcatgattcccatcaatgagccctatggagatgacatggatgccacctaccgccccatgtactccagcgatgtgccccttgacccgctggagatgcacatggacatggatggagactaccccatcgacacctacagcgacggcctcaggcccccgtaccccactgcagaccacatgctggcctaggcggcctggccccagtgacggccccctctttgcaggcttttcctcctctctagaacctccttctgttggaggccctcccatctccccgctgaaacctgcgctccttttttggggggatcctttgctgctgagcttccccaagcacggtgtgccctggcctgccttcttcttgtgtctttggtggggatggggaggcctattcctgctggccccttctgggggtggtgggcaggtgacacggagtggcttgagcttctggggatgcaggtccaccgagcccctgacccctgtctgtccccgctcccctaacaggtgcggttcctcatctgagaggctctccgtgcaggcgatggggcaagacagaaaagtgcctgagctggggaagccggggtgtaacttcctgctgcaccctgcgcctccagaggtcctccgtagggtctttcttgggatagtgttctgctcctgcttttctgtcctgggcatgggtccagggcctgacaccccctccccgcccctgtggccctggccactaaagcttcagactcaagtacccattctgttttcccccagcaacgcccctccaaacctccagcctccctgtctccagctgcctgggcccggaagggctttggttccttctctgggtctgattttctcactgaactccaccgaccaactgccctaagcccccagggcctccagggcccaggttcgagacccaaacccccaaaatccaaaacttctcttgaaaagttcagggaccgtccaggggagatggggaggagatatggagtgagtcacctgctccagaagatgccagcttctctctccagggtgcttagttggctttgcccacccctcactccccagggagctccggggacagcttcctcacacccctgtcccacccacacagctgccctagctgaccccgagaagtgctcttggctgacccctctggtgtgtggtgaggggctttctcttccccttcctgtttcagacccccccatttcccgcacatggtgtggggggctgggggaggtccaagcagagtgttttattattatcgctttatgtttttggttattggtttttttgtatagaccaaagcaaagaaaataaaaataacacag

SEQ ID NO: 463 - DNA, 1355 bp, Homo sapiens
  3' terminal sequence
  Growth arrest and cDNA-damage-inducible, alpha (GADD45A)
cagtggctggtaggcagtggctgggaggcagcggcccaattagtgtcgtgcggcccgtggcgaggcgaggtccggggagcgagcgagcaagcaaggcgggaggggtggccggagctgcggcggctggcacaggaggaggagcccgggcgggcgaggggcggccggagagcgccagggcctgagctgccggagcggcgcctgtgagtgagtgcagaaagcaggcgcccgcgcgctagccgtggcaggagcagcccgcacgccgcgctctctccctgggcgacctgcagtttgcaatatgactttggaggaattctcggctggagagcagaagaccgaaaggatggataaggtgggggatgccctggaggaagtgctcagcaaagccctgagtcagcgcacgatcactgtcggggtgtacgaagcggccaagctgctcaacgtcgaccccgataacgtggtgttgtgcctgctggcggcggacgaggacgacgacagagatgtggctctgcagatccacttcaccctgatccaggcgttttgctgcgagaacgacatcaacatcctgcgcgtcagcaacccgggccggctggcggagctcctgctcttggagaccgacgctggccccgcggcgagcgagggcgccgagcagcccccggacctgcactgcgtgctggtgacgaatccacattcatctcaatggaaggatcctgccttaagtcaacttatttgtttttgccgggaaagtcgctacatggatcaatgggttccagtgattaatctccctgaacggtgatggcatctgaatgaaaataactgaaccaaattgcactgaagtttttgaaatacctttgtagttactcaagcagttactccctacactgatgcaaggattacagaaactgatgccaaggggctgagtgagttcaactacatgttctgggggcccggagatagatgactttgcagatggaaagaggtgaaaatgaagaaggaagctgtgttgaaacagaaaaataagtcaaaaggaacaaaaattacaaagaaccatgcaggaaggaaaactatgtattaatttagaatggttgagttacattaaaataaaccaaatatgttaaagtttaagtgtgcagccatagtttgggtatttttggtttatatgccctcaagtaaaagaaaagccgaaagggttaatcatatttgaaaaccatattttattgtattttgatgagatattaaattctcaaagttttattataaattctactaagttattttatgacatgaaaagttatttatgctataaattttttgaaacacaatacctacaataaactggtatgaataattgcatcatt

SEQ ID NO: 464 - DNA, 732 bp, Homo sapiens
  3' terminal sequence
  Non-metastatic cells 1, protein (NM23A) expressed in (NME1)
tgctgcgaaccacgtgggtcccgggcgcgtttcgggtgctggcggctgcagccggagttcaaacctaagcagctggaaggaaccatggccaactgtgagcgtaccttcattgcgatcaaaccagatggggtccagcggggtcttgtgggagagattatcaagcgttttgagcagaaaggattccgccttgttggtctgaaattcatgcaagcttccgaagatcttctcaaggaacactacgttgacctgaaggaccgtccattctttgccggcctggtgaaatacatgcactcagggccggtagttgccatggtctgggaggggctgaatgtggtgaagacgggccgagtcatgctcggggagaccaaccctgcagactccaagcctgggaccatccgtggagacttctgcatacaagttggcaggaacattatacatggcagtgattctgtggagagtgcagagaaggagatcggcttgtggtttcaccctgaggaactggtagattacacgagctgtgctcagaactggatctatgaatgacaggagggcagaccacattgcttttcacatccatttcccctccttcccatgggcagaggaccaggctgtaggaaatctagttatttacaggaacttcatcataatttggagggaagctcttggagctgtgagttctccctgtacagtgttaccatccccgaccatctgattaaaatgcttcctcccagc

SEQ ID NO: 465 - DNA, 942 bp, Homo sapiens
  3' terminal sequence
  Ribosomal protein L13 (RPL13) (ex BBC1)
ctttccgctcggctgttttcctgcgcaggagccgcagggccgtaggcagccatggcgcccagccggaatggcatggtcttgaagccccacttccacaaggactggcagcggcgcgtggccacgtggttcaaccagccggcccgtaagatccgcagacgtaaggcccggcaagccaaggcgcgccgcatcgccccgcgccccgcgtcgggtcccatccggcccatcgtgcgctgccccacggttcggtaccacacgaaggtgcgcgccggccgcggcttcagcctggaggagctcagggtggccggcattcacaagaaggtggcccggaccatcggcatttctgtggatccgaggaggcggaacaagtccacggagtccctgcagaccaacgtgcagcggctgaaggagtaccgctccaaactcatcctcttccccaggaagccctcggcccccaagaagggagacagttctgctgaagaactgaaactggccacccagctgaccggaccggtcatgcccgtccggaacgtctataagaaggagaaagctcgagtcatcactgaggaagagaagaatttcaaagccttcgctagtctccgtatggcccgtgccaacgcccggctcttcggcatacgggcaaaaagagccaaggaagccgcagaacaggatgttgaaaagaaaaaataaagccctcctggggacttggaatcagtcgggcagtcatgctgggtctccacgtggtgtgtttcgtgggaacaactgggcctgggatggggcttcactgctgtgacttcctcctgccaggggatttggggctttcttgaaagacagtccaagccctggataatgctttactttctgtgttgaagcactgttggttgtttggttagtgactgatgtaaaacggttttcttgtggggaggttacagaggctgacttcag

SEQ ID NO: 466 - DNA, 755 bp, Homo sapiens
  3' terminal sequence
  vascular endothelial growth factor B (VEGFB)m
caccatgagccctctgctccgccgcctgctgctcgccgcactcctgcagctggcccccgcccaggcccctgtctcccagcctgatgcccctggccaccagaggaaagtggtgtcatggatagatgtgtatactcgcgctacctgccagccccgggaggtggtggtgcccttgactgtggagctcatgggcaccgtggccaaacagctggtgcccagctgcgtgactgtgcagcgctgtggtggctgctgccctgacgatggcctggagtgtgtgcccactgggcagcaccaagtccggatgcagatcctcatgatccggtacccgagcagtcagctgggggagatgtccctggaagaacacagccagtgtgaatgcagacctaaaaaaaaggacagtgctgtgaagccagacagggctgccactccccaccaccgtccccagccccgttctgttccgggctgggactctgcccccggagcaccctccccagctgacatcacccatcccactccagccccaggcccctctgcccacgctgcacccagcaccaccagcgccctgacccccggacctgccgccgccgctgccgacgccgcagcttcctccgttgccaagggcggggcttagagctcaacccagacacctgcaggtgccggaagctgcgaaggtgacacatggcttttcagactcagcagggtgacttgcctcagaggctatatcccagtgggggaacaaagaggagcctggtaaaaaa

SEQ ID NO: 467 - DNA, 1039 bp, Homo sapiens
  3' terminal sequence
  Laminin receptor 1 (67kD, ribosomal protein SA) (LAMR1)
tgcctgtcttttccgtgctacctgcagaggggtccatacggcgttgttctggattcccgtcgtaacttaaagggaaactttcacaatgtccggagcccttgatgtcctgcaaatgaaggaggaggatgtccttaagttccttgcagcaggaacccacttaggtggcaccaatcttgacttccagatggaacagtacatctataaaaggaaaagtgatggcatctatatcataaatctcaagaggacctgggagaagcttctgctggcagctcgtgcaattgttgccattgaaaaccctgctgatgtcagtgttatatcctccaggaatactggccagagggctgtgctgaagtttgctgctgccactggagccactccaattgctggccgcttcactcctggaaccttcactaaccagatccaggcagccttccgggagccacggcttcttgtggttactgaccccagggctgaccaccagcctctcacggaggcatcttatgttaacctacctaccattgcgctgtgtaacacagattctcctctgcgctatgtggacattgccatcccatgcaacaacaagggagctcactcagtgggtttaatgtggtggatgctggctcgggaagttctgcgcatgcgtggcaccatttcccgtgaacacccatgggaggtcatgcctgatctgtacttctacagagatcctgaagagattgaaaaagaagagcaggctgctgctgagaaggcagtgaccaaggaggaatttcagggtgaatggactgctcccgctcctgagttcactgctactcagcctgaggttgcagactggtctgaaggtgtacaggtgccctctgtgcctattcagcaattccctactgaagactggagcgctcagcctgccacggaagactggtctgcagctcccactgctcaggccactgaatgggtaggagcaaccactgactggtcttaagctgttcttgcataggctcttaagcagcatggaaaaatggttgatggaaaataaacatcagtttct

SEQ ID NO: 468 - DNA, 240 bp, Homo sapiens
  3' terminal sequence
  Chorionic somatomammotropin hormone 1 (placental lactogen) = LACTOGEN Precursor
  modified_base (151): a, t, c or g
  modified_base (157): a, t, c or g
  modified_base (161): a, t, c or g
  modified_base (166): a, t, c or g
  modified_base (177): a, t, c or g
  modified_base (180): a, t, c or g
  modified_base (183): a, t, c or g
  modified_base (189): a, t, c or g
  modified_base (195): a, t, c or g
  modified_base (202): a, t, c or g
  modified_base (239): a, t, c or g
attcggcacgatgactggccagggtataaaaagggcccacaagagaccggctctaggatcccaaggcccaactccccgaaccactcagggtcctgtggcagctcacctagtggcaatggctccaggctcccggaacgtccctgatcctggnttttgncctnctctnactgccctggnttnaanaagctngtgccntccaaancgttccgttatccagggtttttgaccacgctatgctnc

1. A polynucleotide library useful in the molecular characterization of a carcinoma, said library comprising a pool of polynucleotide sequences or subsequences thereof wherein said sequences or subsequences are either underexpressed or overexpressed in tumor cells, further wherein said sequences or subsequences correspond substantially to any of the polynucleotide sequences set forth in any of SEQ ID Nos: 1-468 or the complement thereof.

2. A polynucleotide library useful in the molecular characterization of a carcinoma, said library comprising a pool of polynucleotide sequences or subsequences thereof wherein said sequences or subsequences are overexpressed or underexpressed in tumor cells, further wherein said sequences or subsequences correspond substantially to any of the polynucleotide sequences set forth in any of SEQ ID No: 1, SEQ ID No: 3, SEQ ID No: 5, SEQ ID No: 7, SEQ ID No: 8, SEQ ID No: 9, SEQ ID No: 11, SEQ ID No: 13, SEQ ID No: 14, SEQ ID No: 16, SEQ ID No: 17, SEQ ID No: 18, SEQ ID No: 20, SEQ ID No: 22, SEQ ID No: 23, SEQ ID No: 25, SEQ ID No: 27, SEQ ID No: 28, SEQ ID No: 30, SEQ ID No: 32, SEQ ID No: 33, SEQ ID No: 35, SEQ ID No: 36, SEQ ID No: 37, SEQ ID No: 39, SEQ ID No: 40, SEQ ID No: 42, SEQ ID No: 44, SEQ ID No: 46, SEQ ID No: 48, SEQ ID No: 49, SEQ ID No: 51, SEQ ID No: 52, SEQ ID No: 54, SEQ ID No: 55, SEQ ID No: 57, SEQ ID No: 59, SEQ ID No: 60, SEQ ID No: 65, SEQ ID No: 66, SEQ ID No: 68, SEQ ID No: 69, SEQ ID No: 71, SEQ ID No: 73, SEQ ID No: 74, SEQ ID No: 76, SEQ ID No: 79, SEQ ID No: 80, SEQ ID No: 82, SEQ ID No: 86, SEQ ID No: 88, SEQ ID No: 89, SEQ ID No: 91, SEQ ID No: 94, SEQ ID No: 95, SEQ ID No: 97, SEQ ID No: 98, SEQ ID No: 102, SEQ ID No: 104, SEQ ID No: 109, SEQ ID No: 111, SEQ ID No: 112, SEQ ID No: 114, SEQ ID No: 115, SEQ ID No: 116, SEQ ID No: 120, SEQ ID No: 123, SEQ ID No: 126, SEQ ID No: 127, SEQ ID No: 129, SEQ ID No: 131, SEQ ID No: 133, SEQ ID No: 135, SEQ ID No: 136, SEQ ID No: 138, SEQ ID No: 139, SEQ ID No: 141, SEQ ID No: 142, SEQ ID No: 144, SEQ ID No: 145, SEQ ID No: 147, SEQ ID No: 148, SEQ ID No: 150, SEQ ID No: 153, SEQ ID No: 154, SEQ ID No: 156, SEQ ID No: 157, SEQ ID No: 159, SEQ ID No: 160, SEQ ID No: 162, SEQ ID No: 164, SEQ ID No: 166, SEQ ID No: 167, SEQ ID No: 168, SEQ ID No: 171, SEQ ID No: 173, SEQ ID No: 174, SEQ ID No: 176, SEQ ID No: 178, SEQ ID No: 180, SEQ ID No: 181, SEQ ID No: 183, SEQ ID No: 185, SEQ ID No: 186, SEQ ID No: 187, SEQ ID No: 189, SEQ ID No: 190, SEQ ID No: 192, SEQ ID No: 194, SEQ ID No: 196, SEQ ID No: 197, SEQ ID No: 201, SEQ ID No: 202, SEQ ID No: 204, SEQ ID No: 205, SEQ ID No: 206, SEQ ID No: 208, SEQ ID No: 212, SEQ ID No: 214, SEQ ID No: 216, SEQ ID No: 218, SEQ ID No: 219, SEQ ID No: 221, SEQ ID No: 223, SEQ ID No: 224, SEQ ID No: 226, SEQ ID No: 230, SEQ ID No: 231, SEQ ID No: 233, SEQ ID No: 238, SEQ ID No: 239, SEQ ID No: 240, SEQ ID No: 242, SEQ ID No: 243, SEQ ID No: 245, SEQ ID No: 246, SEQ ID No: 248, SEQ ID No: 250, SEQ ID No: 251, SEQ ID No: 253, SEQ ID No: 255, SEQ ID No: 259, SEQ ID No: 260, SEQ ID No: 263, SEQ ID No: 265, SEQ ID No: 269, SEQ ID No: 271, SEQ ID No: 277, SEQ ID No: 279, SEQ ID No: 280, SEQ ID No: 284, SEQ ID No: 286, SEQ ID No: 287, SEQ ID No: 289, SEQ ID No: 291, SEQ ID No: 293, SEQ ID No: 294, SEQ ID No: 296, SEQ ID No: 298, SEQ ID No: 299, SEQ ID No: 301, SEQ ID No: 302, SEQ ID No: 303, SEQ ID No: 305, SEQ ID No: 306, SEQ ID No: 308, SEQ ID No: 309, SEQ ID No: 311, SEQ ID No: 312, SEQ ID No: 314, SEQ ID No: 315, SEQ ID No: 317, SEQ ID No: 319, SEQ ID No: 320, SEQ ID No: 322, SEQ ID No: 323, SEQ ID No: 324, SEQ ID No: 326, SEQ ID No: 327, SEQ ID No: 329, SEQ ID No: 331, SEQ ID No: 332, SEQ ID No: 334, SEQ ID No: 335, SEQ ID No: 339, SEQ ID No: 340, SEQ ID No: 345, SEQ ID No: 347, SEQ ID No: 350, SEQ ID No: 352, SEQ ID No: 354, SEQ ID No: 356, SEQ ID No: 358, SEQ ID No: 359, SEQ ID No: 368, SEQ ID No: 369, SEQ ID No: 370, SEQ ID No: 374, SEQ ID No: 375, SEQ ID No: 380, SEQ ID No: 382, SEQ ID No: 383, SEQ ID No: 385, SEQ ID No: 386, SEQ ID No: 388, SEQ ID No: 392, SEQ ID No: 394, SEQ ID No: 402, SEQ ID No: 404, SEQ ID No: 405, SEQ ID No: 414, SEQ ID No: 415, SEQ ID No: 417, SEQ ID No: 418, SEQ ID No: 430, SEQ ID No: 431, SEQ ID No: 435, SEQ ID No: 437, SEQ ID No: 439, SEQ ID No: 440, SEQ ID No: 443, SEQ ID No: 444, SEQ ID No: 445, SEQ ID No: 446, SEQ ID No: 447, SEQ ID No: 448, SEQ ID No: 449, SEQ ID No: 450, SEQ ID No: 451, SEQ ID No: 452, SEQ ID No: 453, SEQ ID No: 454, SEQ ID No: 455, SEQ ID No: 456, SEQ ID No: 457, SEQ ID No: 458, SEQ ID No: 459, SEQ ID No: 460, SEQ ID No: 461, SEQ ID No: 462, SEQ ID No: 463, SEQ ID No: 464, SEQ ID No: 465, SEQ ID No: 466, SEQ ID No: 467, SEQ ID No: 468 or the complement thereof.

3. The polynucleotide library of claim 2 wherein said tumor cells are breast tumor cells.

4. The polynucleotide library of claim 2 wherein the pool of polynucleotide sequences or subsequences correspond substantially to the polynucleotide sequences set forth in any of SEQ ID No: 1, SEQ ID No: 3, SEQ ID No: 5, SEQ ID No: 7, SEQ ID No: 8, SEQ ID No: 9, SEQ ID No: 11, SEQ ID No: 13, SEQ ID No: 14 SEQ ID No: 16, SEQ ID No: 17, SEQ ID No: 18, SEQ ID No: 20, SEQ ID No: 22, SEQ ID No: 23, SEQ ID No: 25, SEQ ID No: 27, SEQ ID No: 28, SEQ ID No: 30, SEQ ID No: 32, SEQ ID No: 33, SEQ ID No: 35, SEQ ID No: 36, SEQ ID No: 37, SEQ ID No: 39, SEQ ID No: 40, SEQ ID No: 42, SEQ ID No: 44, SEQ ID No: 46, SEQ ID No: 48, SEQ ID No: 49, SEQ ID No: 51, SEQ ID No: 52, SEQ ID No: 54, SEQ ID No: 55, SEQ ID No: 57, SEQ ID No: 59, SEQ ID No: 60, SEQ ID No: 65, SEQ ID No: 66, SEQ ID No: 68, SEQ ID No: 69, SEQ ID No: 71, SEQ ID No: 73, SEQ ID No: 74, SEQ ID No: 76, SEQ ID No: 79, SEQ ID No: 80, SEQ ID No: 82, SEQ ID No: 86, SEQ ID No: 88, SEQ ID No: 89, SEQ ID No: 91, SEQ ID No: 94, SEQ ID No: 95, SEQ ID No: 97, SEQ ID No: 98, SEQ ID No: 102, SEQ ID No: 104, SEQ ID No: 109, SEQ ID No: 111, SEQ ID No: 112, SEQ ID No: 114, SEQ ID No: 115, SEQ ID No: 116, SEQ ID No: 120, SEQ ID No: 123, SEQ ID No: 126, SEQ ID No: 127, SEQ ID No: 129, SEQ ID No: 131, SEQ ID No: 133, SEQ ID No: 135, SEQ ID No: 136, SEQ ID No: 138, SEQ ID No: 139, SEQ ID No: 141, SEQ ID No: 142, SEQ ID No: 144, SEQ ID No: 145, SEQ ID No: 147, SEQ ID No: 148, SEQ ID No: 150, SEQ ID No: 153, SEQ ID No: 154, SEQ ID No: 156, SEQ ID No: 157, SEQ ID No: 159, SEQ ID No: 160, SEQ ID No: 162, SEQ ID No: 164, SEQ ID No: 166, SEQ ID No: 167, SEQ ID No: 168, SEQ ID No: 171, SEQ ID No: 173, SEQ ID No: 174, SEQ ID No: 176, SEQ ID No: 178, SEQ ID No: 180, SEQ ID No: 181, SEQ ID No: 183, SEQ ID No: 185, SEQ ID No: 186, SEQ ID No: 187, SEQ ID No: 192, SEQ ID No: 194, SEQ ID No: 196, SEQ ID No: 197, SEQ ID No: 201, SEQ ID No: 202, SEQ ID No: 204, SEQ ID No: 205, SEQ ID No: 206, SEQ ID No: 208, SEQ ID No: 212, SEQ ID No: 214, SEQ ID No: 216, SEQ ID No: 218, SEQ ID No: 219, SEQ ID No: 221, SEQ ID No: 223, SEQ ID No: 224, SEQ ID No: 226, SEQ ID No: 230, SEQ ID No: 231, SEQ ID No: 233, SEQ ID No: 238, SEQ ID No: 239, SEQ ID No: 240, SEQ ID No: 242, SEQ ID No: 243, SEQ ID No: 245, SEQ ID No: 246, SEQ ID No: 248, SEQ ID No: 250, SEQ ID No: 251, SEQ ID No: 253, SEQ ID No: 255, SEQ ID No: 259, SEQ ID No: 260, SEQ ID No: 263, SEQ ID No: 265, SEQ ID No: 269, SEQ ID No: 271, SEQ ID No: 277, SEQ ID No: 279, SEQ ID No: 280, SEQ ID No: 284, SEQ ID No: 286, SEQ ID No: 287, SEQ ID No: 289, SEQ ID No: 291, SEQ ID No: 293, SEQ ID No: 294, SEQ ID No: 296, SEQ ID No: 298, SEQ ID No: 299, SEQ ID No: 301, SEQ ID No: 302, SEQ ID No: 303, SEQ ID No: 305, SEQ ID No: 306, SEQ ID No: 308, SEQ ID No: 309, SEQ ID No: 311, SEQ ID No: 312, SEQ ID No: 314, SEQ ID No: 315, SEQ ID No: 317, SEQ ID No: 319, SEQ ID No: 320, SEQ ID No: 322, SEQ ID No: 323, SEQ ID No: 324, SEQ ID No: 326, SEQ ID No: 327, SEQ ID No: 329, SEQ ID No: 331, SEQ ID No: 332, SEQ ID No: 334, SEQ ID No: 335, SEQ ID No: 339, SEQ ID No: 340, SEQ ID No: 345, SEQ ID No: 347, SEQ ID No: 350, SEQ ID No: 352, SEQ ID No: 354, SEQ ID No: 356, SEQ ID No: 358, SEQ ID No: 359, SEQ ID No: 368, SEQ ID No: 369, SEQ ID No: 370, SEQ ID No: 374, SEQ ID No: 375, SEQ ID No: 380, SEQ ID No: 382, SEQ ID No: 383, SEQ ID No: 385, SEQ ID No: 386, SEQ ID No: 388, SEQ ID No: 392, SEQ ID No: 394, SEQ ID No: 402, SEQ ID No: 404, SEQ ID No: 405, SEQ ID No: 414, SEQ ID No: 415, SEQ ID No: 417, SEQ ID No: 418, SEQ ID No: 430, SEQ ID No: 431, SEQ ID No: 435, SEQ ID No: 437, SEQ ID No: 439, SEQ ID No: 440, SEQ ID No: 443, SEQ ID No: 444, SEQ ID No: 445, SEQ ID No: 446, SEQ ID No: 447, SEQ ID No: 448, SEQ ID No: 449, SEQ ID No: 450, SEQ ID No: 451, SEQ ID No: 452, SEQ ID No: 453, SEQ ID No: 454, SEQ ID No: 455, SEQ ID No: 456, SEQ ID No: 457, SEQ ID No: 458, SEQ ID No: 459, SEQ ID No: 460, SEQ ID No: 461, SEQ ID No: 462, SEQ ID No: 463, SEQ ID No: 464, SEQ ID No: 465, SEQ ID No: 466, SEQ ID No: 467, SEQ ID No: 468; and
further wherein said polynucleotide sequences or subsequences of said pool are useful in differentiating a normal cell from a cancer cell.

5. The polynucleotide library of claim 2 wherein the pool of polynucleotide sequences or subsequences correspond substantially to the polynucleotide sequences set forth in any of SEQ ID No: 1, SEQ ID No: 3, SEQ ID No: 5, SEQ ID No: 7, SEQ ID No: 8, SEQ ID No: 9, SEQ ID No: 11, SEQ ID No: 13, SEQ ID No: 14, SEQ ID No: 16, SEQ ID No: 17, SEQ ID No: 18, SEQ ID No: 20, SEQ ID No: 22, SEQ ID No: 23, SEQ ID No: 25, SEQ ID No: 27, SEQ ID No: 28, SEQ ID No: 30, SEQ ID No: 32, SEQ ID No: 33, SEQ ID No: 35, SEQ ID No: 36, SEQ ID No: 37, SEQ ID No: 39, SEQ ID No: 40, SEQ ID No: 42, SEQ ID No: 44, SEQ ID No: 46, SEQ ID No: 48, SEQ ID No: 49, SEQ ID No: 51, SEQ ID No: 52, SEQ ID No: 54, SEQ ID No: 55, SEQ ID No: 57, SEQ ID No: 59, SEQ ID No: 60 , SEQ ID No: 65, SEQ ID No: 66, SEQ ID No: 68, SEQ ID No: 69, SEQ ID No: 71, SEQ ID No: 73, SEQ ID No: 74, SEQ ID No: 76, SEQ ID No: 79, SEQ ID No: 80, SEQ ID No: 82, SEQ ID No: 86, SEQ ID No: 88, SEQ ID No: 89, SEQ ID No: 94, SEQ ID No: 95, SEQ ID No: 97, SEQ ID No: 98, SEQ ID No: 102, SEQ ID No: 104, SEQ ID No: 109, SEQ ID No: I-l, SEQ ID No: 112, SEQ ID No: 114, SEQ ID No: 115, SEQ ID No: 116, SEQ ID No: 120, SEQ ID No: 123, SEQ ID No: 126, SEQ ID No: 127, SEQ ID No: 129, SEQ ID No: 131, SEQ ID No: 133, SEQ ID No: 135, SEQ ID No: 136, SEQ ID No: 141, SEQ ID No: 142, SEQ ID No: 144, SEQ ID No: 145, SEQ ID No: 147, SEQ ID No: 148, SEQ ID No: 150, SEQ ID No: 153, SEQ ID No: 154, SEQ ID No: 156, SEQ ID No: 157, SEQ ID No: 159, SEQ ID No: 160, SEQ ID No: 162, SEQ ID No: 164, SEQ ID No: 166, SEQ ID No: 167, SEQ ID No: 171, SEQ ID No: 173, SEQ ID No: 174, SEQ ID No: 176, SEQ ID No: 178, SEQ ID No: 180, SEQ ID No: 181, SEQ ID No: 183, SEQ ID No: 185, SEQ ID No: 186, SEQ ID No: 187, SEQ ID No: 192, SEQ ID No: 194, SEQ ID No: 196, SEQ ID No: 197, SEQ ID No: 201, SEQ ID No: 202, SEQ ID No: 204, SEQ ID No: 205, SEQ ID No: 206, SEQ ID No: 208, SEQ ID No: 212, SEQ ID No: 214, SEQ ID No: 216, SEQ ID No: 218, SEQ ID No: 219, SEQ ID No: 221, SEQ ID No: 223, SEQ ID No: 224, SEQ ID No: 226, SEQ ID No: 230, SEQ ID No: 231, SEQ ID No: 233, SEQ ID No: 238, SEQ ID No: 239, SEQ ID No: 240, SEQ ID No: 242, SEQ ID No: 243, SEQ ID No: 245, SEQ ID No: 246, SEQ ID No: 248, SEQ ID No: 250, SEQ ID No: 251, SEQ ID No: 253, SEQ ID No: 255, SEQ ID No: 259, SEQ ID No: 260, SEQ ID No: 263, SEQ ID No: 265, SEQ ID No: 269, SEQ ID No: 271, SEQ ID No: 277, SEQ ID No: 279, SEQ ID No: 280, SEQ ID No: 284, SEQ ID No: 286, SEQ ID No: 287, SEQ ID No: 289, SEQ ID No: 291, SEQ ID No: 293, SEQ ID No: 294, SEQ ID No: 296, SEQ ID No: 298, SEQ ID No: 299, SEQ ID No: 301, SEQ ID No: 302, SEQ ID No: 303, SEQ ID No: 305, SEQ ID No: 306, SEQ ID No: 308, SEQ ID No: 309, SEQ ID No: 311, SEQ ID No: 312, SEQ ID No: 314, SEQ ID No: 315, SEQ ID No: 317, SEQ ID No: 319, SEQ ID No: 320, SEQ ID No: 322, SEQ ID No: 323, SEQ ID No: 324, SEQ ID No: 326, SEQ ID No: 327, SEQ ID No: 329, SEQ ID No: 331, SEQ ID No: 332, SEQ ID No: 334, SEQ ID No: 335, SEQ ID No: 339, SEQ ID No: 340, SEQ ID No: 345, SEQ ID No: 347, SEQ ID No: 350, SEQ ID No: 352, SEQ ID No: 354, SEQ ID No: 356, SEQ ID No: 358, SEQ ID No: 359, SEQ ID No: 368, SEQ ID No: 369, SEQ ID No: 370, SEQ ID No: 374, SEQ ID No: 375, SEQ ID No: 380, SEQ ID No: 382, SEQ ID No: 383, SEQ ID No: 385, SEQ ID No: 386, SEQ ID No: 388, SEQ ID No: 392, SEQ ID No: 394, SEQ ID No: 402, SEQ ID No: 404, SEQ ID No: 405, SEQ ID No: 414, SEQ ID No: 415, SEQ ID No: 417, SEQ ID No: 418, SEQ ID No: 430, SEQ ID No: 431, SEQ ID No: 435, SEQ ID No: 437, SEQ ID No: 439, SEQ ID No: 440, SEQ ID No: 443, SEQ ID No: 444, SEQ ID No: 445, SEQ ID No: 446, SEQ ID No: 447, SEQ ID No: 448, SEQ ID No: 449, SEQ ID No: 450, SEQ ID No: 451, SEQ ID No: 452, SEQ ID No: 453, SEQ ID No: 454, SEQ ID No: 455, SEQ ID No: 456, SEQ ID No: 457, SEQ ID No: 458, SEQ ID No: 459, SEQ ID No: 460, SEQ ID No: 461, SEQ ID No: 462, SEQ ID No: 463, SEQ ID No: 464, SEQ ID No: 465, SEQ ID No: 466, SEQ ID No: 467, and
wherein said polynucleotide sequences or subsequences of said pool are useful in detecting a hornone-sensitive tumor cell.

6. The library polynucleotide of claim 2 wherein the pool of polynucleotide sequences or subsequences correspond substantially to the polynucleotide sequences set forth in any of SEQ ID No: 1, SEQ ID No: 3, SEQ ID No: 5, SEQ ID No: 7, SEQ ID No: 8, SEQ ID No: 9, SEQ ID No: 1, SEQ ID No: 13, SEQ ID No: 14, SEQ ID No: 16, SEQ ID No: 17, SEQ ID No: 18, SEQ ID No: 20, SEQ ID No: 22, SEQ ID No: 23, SEQ ID No: 25, SEQ ID No: 27, SEQ ID No: 28, SEQ ID No: 30, SEQ ID No: 32, SEQ ID No: 33, SEQ ID No: 35, SEQ ID No: 36, SEQ ID No: 37, SEQ ID No: 39, SEQ ID No: 40, SEQ ID No: 42, SEQ ID No: 44, SEQ ID No: 46, SEQ ID No: 48, SEQ ID No: 49, SEQ ID No: 51, SEQ ID No: 52, SEQ ID No: 54, SEQ ID No: 55, SEQ ID No: 57, SEQ ID No: 59, SEQ ID No: 60, SEQ ID No: 65, SEQ ID No: 66, SEQ ID No: 68, SEQ ID No: 69, SEQ ID No: 71, SEQ ID No: 73, SEQ ID No: 74, SEQ ID No: 76, SEQ ID No: 79, SEQ ID No: 80, SEQ ID No: 82, SEQ ID No: 86, SEQ ID No: 88, SEQ ID No: 89, SEQ ID No: 94, SEQ ID No: 95, SEQ ID No: 97, SEQ ID No: 98, SEQ ID No: 102, SEQ ID No: 104, SEQ ID No: 109, SEQ ID No: 111, SEQ ID No: 112, SEQ ID No: 114, SEQ ID No: 115, SEQ ID No: 116, SEQ ID No: 120, SEQ ID No: 123, SEQ ID No: 126, SEQ ID No: 127, SEQ ID No: 129, SEQ ID No: 131, SEQ ID No: 133, SEQ ID No: 135, SEQ ID No: 136, SEQ ID No: 141, SEQ ID No: 142, SEQ ID No: 144, SEQ ID No: 145, SEQ ID No: 147, SEQ ID No: 148, SEQ ID No: 150, SEQ ID No: 153, SEQ ID No: 154, SEQ ID No: 156, SEQ ID No: 157, SEQ ID No: 159, SEQ ID No: 160, SEQ ID No: 162, SEQ ID No: 164, SEQ ID No: 166, SEQ ID No: 167, SEQ ID No: 171, SEQ ID No: 173, SEQ ID No: 174, SEQ ID No: 176, SEQ ID No: 178, SEQ ID No: 180, SEQ ID No: 181, SEQ ID No: 183, SEQ ID No: 185, SEQ ID No: 186, SEQ ID No: 187, SEQ ID No: 192, SEQ ID No: 194, SEQ ID No: 196, SEQ ID No: 197, SEQ ID No: 201, SEQ ID No: 202, SEQ ID No: 204, SEQ ID No: 205, SEQ ID No: 206, SEQ ID No: 208, SEQ ID No: 212, SEQ ID No: 214, SEQ ID No: 216, SEQ ID No: 218, SEQ ID No: 219, SEQ ID No: 221, SEQ ID No: 223, SEQ ID No: 224, SEQ ID No: 226, SEQ ID No: 230, SEQ ID No: 231, SEQ ID No: 233, SEQ ID No: 238, SEQ ID No: 239, SEQ ID No: 240, SEQ ID No: 242, SEQ ID No: 243, SEQ ID No: 245, SEQ ID No: 246, SEQ ID No: 248, SEQ ID No: 250, SEQ ID No: 251, SEQ ID No: 253, SEQ ID No: 255, SEQ ID No: 259, SEQ ID No: 260, SEQ ID No: 263, SEQ ID No: 265, SEQ ID No: 269, SEQ ID No: 271, SEQ ID No: 277, SEQ ID No: 279, SEQ ID No: 280, SEQ ID No: 284, SEQ ID No: 286, SEQ ID No: 287, SEQ ID No: 289, SEQ ID No: 291, SEQ ID No: 293, SEQ ID No: 294, SEQ ID No: 296, SEQ ID No: 298, SEQ ID No: 299, SEQ ID No: 301, SEQ ID No: 302, SEQ ID No: 303, SEQ ID No: 305, SEQ ID No: 306, SEQ ID No: 308, SEQ ID No: 309, SEQ ID No: 311, SEQ ID No: 312, SEQ ID No: 314, SEQ ID No: 315, SEQ ID No: 317, SEQ ID No: 319, SEQ ID No: 320, SEQ ID No: 322, SEQ ID No: 323, SEQ ID No: 324, SEQ ID No: 326, SEQ ID No: 327, SEQ ID No: 329, SEQ ID No: 331, SEQ ID No: 332, SEQ ID No: 334, SEQ ID No: 335, SEQ ID No: 339, SEQ ID No: 340, SEQ ID No: 345, SEQ ID No: 347, SEQ ID No: 350, SEQ ID No: 352, SEQ ID No: 354, SEQ ID No: 356, SEQ ID No: 358, SEQ ID No: 359, SEQ ID No: 368, SEQ ID No: 369, SEQ ID No: 370, SEQ ID No: 374, SEQ ID No: 375, SEQ ID No: 380, SEQ ID No: 382, SEQ ID No: 383, SEQ ID No: 385, SEQ ID No: 386, SEQ ID No: 388, SEQ ID No: 392, SEQ ID No: 394, SEQ ID No: 402, SEQ ID No: 404, SEQ ID No: 405, SEQ ID No: 414, SEQ ID No: 415, SEQ ID No: 417, SEQ ID No: 418, SEQ ID No: 430, SEQ ID No: 431, SEQ ID No: 435, SEQ ID No: 437, SEQ ID No: 439, SEQ ID No: 440, SEQ ID No: 443, SEQ ID No: 444, SEQ ID No: 445, SEQ ID No: 446, SEQ ID No: 447, SEQ ID No: 448, SEQ ID No: 449, SEQ ID No: 450, SEQ ID No: 451, SEQ ID No: 452, SEQ ID No: 453, SEQ ID No: 454, SEQ ID No: 455, SEQ ID No: 456, SEQ ID No: 457, SEQ ID No: 458, SEQ ID No: 459, SEQ ID No: 460, SEQ ID No: 461, SEQ ID No: 462, SEQ ID No: 463, SEQ ID No: 464, SEQ ID No: 465, SEQ ID No: 466, SEQ ID No: 467; and
wherein said polynucleotide sequences or subsequences of said pool are useful in differentiating a tumor in which a lymph node has been invaded by a tumor cell from a tumor in which a lymph node has not been invaded by a tumor cell.

7. The polynucleotide library of claim 2 wherein the pool of polynucleotide sequences or subsequences correspond substantially to the polynucleotide sequences set forth in any of SEQ ID No: 1, SEQ ID No: 3, SEQ ID No: 5, SEQ ID No: 7, SEQ ID No: 8, SEQ ID No: 9, SEQ ID No: 11, SEQ ID No: 13, SEQ ID No: 14, SEQ ID No: 16, SEQ ID No: 17, SEQ ID No: 18, SEQ ID No: 22, SEQ ID No: 23, SEQ ID No: 25, SEQ ID No: 27, SEQ ID No: 28, SEQ ID No: 30, SEQ ID No: 32, SEQ ID No: 33, SEQ ID No: 35, SEQ ID No: 36, SEQ ID No: 37, SEQ ID No: 39, SEQ ID No: 40, SEQ ID No: 42, SEQ ID No: 44, SEQ ID No: 46, SEQ ID No: 48, SEQ ID No: 49, SEQ ID No: 51, SEQ ID No: 52, SEQ ID No: 54, SEQ ID No: 55, SEQ ID No: 57, SEQ ID No: 59, SEQ ID No: 60, SEQ ID No: 65, SEQ ID No: 66, SEQ ID No: 68, SEQ ID No: 69, SEQ ID No: 71, SEQ ID No: 73, SEQ ID No: 74, SEQ ID No: 76, SEQ ID No: 79, SEQ ID No: 80, SEQ ID No: 82, SEQ ID No: 86, SEQ ID No: 88, SEQ ID No: 89, SEQ ID No: 94, SEQ ID No: 95, SEQ ID No: 102, SEQ ID No: 104, SEQ ID No: 109, SEQ ID No: 111, SEQ ID No: 112, SEQ ID No: 114, SEQ ID No: 115, SEQ ID No: 116, SEQ ID No: 120, SEQ ID No: 123, SEQ ID No: 126, SEQ ID No: 127, SEQ ID No: 129, SEQ ID No: 131, SEQ ID No: 133, SEQ ID No: 135, SEQ ID No: 136, SEQ ID No: 141, SEQ ID No: 142, SEQ ID No: 144, SEQ ID No: 145, SEQ ID No: 147, SEQ ID No: 148, SEQ ID No: 150, SEQ ID No: 153, SEQ ID No: 154, SEQ ID No: 156, SEQ ID No: 157, SEQ ID No: 159, SEQ ID No: 160, SEQ ID No: 162, SEQ ID No: 164, SEQ ID No: 166, SEQ ID No: 167, SEQ ID No: 171, SEQ ID No: 173, SEQ ID No: 174, SEQ ID No: 176, SEQ ID No: 178, SEQ ID No: 180, SEQ ID No: 181, SEQ ID No: 183, SEQ ID No: 185, SEQ ID No: 186, SEQ ID No: 187, SEQ ID No: 192, SEQ ID No: 194, SEQ ID No: 196, SEQ ID No: 197, SEQ ID No: 201, SEQ ID No: 202, SEQ ID No: 204, SEQ ID No: 205, SEQ ID No: 206, SEQ ID No: 208, SEQ ID No: 212, SEQ ID No: 214, SEQ ID No: 216, SEQ ID No: 218, SEQ ID No: 219, SEQ ID No: 221, SEQ ID No: 223, SEQ ID No: 224, SEQ ID No: 226, SEQ ID No: 230, SEQ ID No: 231, SEQ ID No: 233, SEQ ID No: 238, SEQ ID No: 239, SEQ ID No: 240, SEQ ID No: 242, SEQ ID No: 243, SEQ ID No: 245, SEQ ID No: 246, SEQ ID No: 248, SEQ ID No: 250, SEQ ID No: 251, SEQ ID No: 253, SEQ ID No: 255, SEQ ID No: 259, SEQ ID No: 260, SEQ ID No: 263, SEQ ID No: 265, SEQ ID No: 269, SEQ ID No: 271, SEQ ID No: 277, SEQ ID No: 279, SEQ ID No: 280, SEQ ID No: 284, SEQ ID No: 286, SEQ ID No: 287, SEQ ID No: 289, SEQ ID No: 291, SEQ ID No: 293, SEQ ID No: 294, SEQ ID No: 296, SEQ ID No: 298, SEQ ID No: 299, SEQ ID No: 301, SEQ ID No: 302, SEQ ID No: 303, SEQ ID No: 305, SEQ ID No: 306, SEQ ID No: 308, SEQ ID No: 309, SEQ ID No: 311, SEQ ID No: 312, SEQ ID No: 314, SEQ ID No: 315, SEQ ID No: 317, SEQ ID No: 319, SEQ ID No: 320, SEQ ID No: 322, SEQ ID No: 323, SEQ ID No: 324, SEQ ID No: 326, SEQ ID No: 327, SEQ ID No: 329, SEQ ID No: 331, SEQ ID No: 332, SEQ ID No: 334, SEQ ID No: 332, SEQ ID No: 339, SEQ ID No: 340, SEQ ID No: 345, SEQ ID No: 347, SEQ ID No: 350, SEQ ID No: 332, SEQ ID No: 354, SEQ ID No: 356, SEQ ID No: 358, SEQ ID No: 359, SEQ ID No: 368, SEQ ID No: 369, SEQ ID No: 370, SEQ ID No: 374, SEQ ID No: 375, SEQ ID No: 380, SEQ ID No: 382, SEQ ID No: 383, SEQ ID No: 385, SEQ ID No: 386, SEQ ID No: 388, SEQ ID No: 392, SEQ ID No: 394, SEQ ID No: 402, SEQ ID No: 404, SEQ ID No: 405, SEQ ID No: 414, SEQ ID No: 415, SEQ ID No: 417, SEQ ID No: 418, SEQ ID No: 439, SEQ ID No: 443, SEQ ID No: 444, SEQ ID No: 445, SEQ ID No: 446, SEQ ID No: 447, SEQ ID No: 448, SEQ ID No: 449, SEQ ID No: 450, SEQ ID No: 451, SEQ ID No: 452, SEQ ID No: 453, SEQ ID No: 454, SEQ ID No: 455, SEQ ID No: 456, SEQ ID No: 457, and
wherein said polynucleotide sequences or subsequences of said pool are usefull in differentiating anthracycline-sensitive tumors from anthracycline-insensitive tumors.

8. The polynucleotide library of any of claims 2-7 wherein said polynucleotide sequences or subsequences of said pool are immobilized on a solid support in order to form a polynucleotide array.

9. The polynucleotide library of claim 8 wherein the solid support is selected from the group consisting of a nylon membrane, glass slide, glass beads, or a silicon chip.

10. The polynucleotide library of claim 8 wherein the solid support is a membrane on a glass support.

11. A method for detecting differentially expressed polynucleotide sequences which are correlated with a cancer, said method comprising:
obtaining a polynucleotide sample from a patient;
labeling said polynucleotide sample by reacting said polynucleotide sample with a labeled probe immobilized on a solid support wherein said probe comprises any of the polynucleotide sequences of the polynucleotide library of claim 2 or an expression product encoded by any of the polynucleotide sequences of the polynucleotide library of claim 2; and
detecting a polynucleotide sample reaction product.

12. The method of claim 11 further comprising obtaining a control polynucleotide sample, labeling said control sample by reacting said control sample with said labeled probe, detecting a control sample reaction product, and comparing the amount of said polynucleotide sample reaction product to the amount of said control sample reaction product.

13. The method of claims 11 or 12 wherein RNA or mRNA is isolated from said polynucleotide sample.

14. The method of claim 13 wherein mRNA is isolated from said polynucleotide sample and cDNA is obtained by reverse transcription of said niRNA.

15. The method of claim 11 wherein said labeling is performed by hybridizing the polynucleotide sample with the labeled probe.

16. The method of claim 13 wherein said method is used for detecting, diagnosing, staging, monitoring, predicting, preventing or treating conditions associated with cancer.

17. The method of claim 11 wherein the cancer is breast cancer.

18. The method of claim 11 wherein the product encoded by any of the polynucleotide sequences or subsequences is involved in a receptor-ligand reaction on which detection is based.

19. A method for screening an anti-tumor agent comprising the method of claim 11 wherein the polynucleotide sample has been treated with an anti-tumor agent to be screened.

20. The method of claim 11 wherein the label is selected from the group consisting of radioactive, colorimetric, enzymatic, molecular amplification, bioluminescent or fluorescent labels.

21. A library of polynucleotides comprising a population of polynucleotide sequences overexpressed or underexpressed in cells derived from a tumor selected from SEQ ID No: 1, SEQ ID No: 3, SEQ ID No: 5, SEQ ID No: 7, SEQ ID No: 8, SEQ ID No: 9, SEQ ID No: 11, SEQ ID No: 13, SEQ ID No: 14, SEQ ID No: 16, SEQ ID No: 17, SEQ ID No: 18, SEQ ID No: 20, SEQ ID No: 22, SEQ ID No: 23, SEQ ID No: 25, SEQ ID No: 27, SEQ ID No: 28, SEQ ID No: 30, SEQ ID No: 32, SEQ ID No: 33, SEQ ID No: 35, SEQ ID No: 36, SEQ ID No: 37, SEQ ID No: 39, SEQ ID No: 40, SEQ ID No: 42, SEQ ID No: 44, SEQ ID No: 46, SEQ ID No: 48, SEQ ID No: 49, SEQ ID No: 51, SEQ ID No: 52, SEQ ID No: 54, SEQ ID No: 55, SEQ ID No: 57, SEQ ID No: 59, SEQ ID No: 60, SEQ ID No: 65, SEQ ID No: 66, SEQ ID No: 68, SEQ ID No: 69, SEQ ID No: 71, SEQ ID No: 73, SEQ ID No: 74, SEQ ID No: 76, SEQ ID No: 79, SEQ ID No: 80, SEQ ID No: 82, SEQ ID No: 86, SEQ ID No: 88, SEQ ID No: 89, SEQ ID No: 91, SEQ ID No: 94, SEQ ID No: 95, SEQ ID No: 97, SEQ ID No: 98, SEQ ID No: 102, SEQ ID No: 104, SEQ ID No: 109, SEQ ID No: 111, SEQ ID No: 112, SEQ ID No: 114, SEQ ID No: 115, SEQ ID No: 116, SEQ ID No: 120, SEQ ID No: 123, SEQ ID No: 126, SEQ ID No: 127, SEQ ID No: 129, SEQ ID No: 131, SEQ ID No: 133, SEQ ID No: 135, SEQ ID No: 136, SEQ ID No: 138, SEQ ID No: 139, SEQ ID No: 141, SEQ ID No: 142, SEQ ID No: 144, SEQ ID No: 145, SEQ ID No: 147, SEQ ID No: 148, SEQ ID No: 150, SEQ ID No: 153, SEQ ID No: 154, SEQ ID No: 156, SEQ ID No: 157, SEQ ID No: 159, SEQ ID No: 160, SEQ ID No: 162, SEQ ID No: 164, SEQ ID No: 166, SEQ ID No: 167, SEQ ID No: 168, SEQ ID No: 171, SEQ ID No: 173, SEQ ID No: 174, SEQ ID No: 176, SEQ ID No: 178, SEQ ID No: 180, SEQ ID No: 181, SEQ ID No: 183, SEQ ID No: 185, SEQ ID No: 186, SEQ ID No: 187, SEQ ID No: 189, SEQ ID No: 190, SEQ ID No: 192, SEQ ID No: 194, SEQ ID No: 196, SEQ ID No: 197, SEQ ID No: 201, SEQ ID No: 202, SEQ ID No: 204, SEQ ID No: 205, SEQ ID No: 206, SEQ ID No: 208, SEQ ID No: 212, SEQ ID No: 214, SEQ ID No: 216, SEQ ID No: 218, SEQ ID No: 219, SEQ ID No: 221, SEQ ID No: 223, SEQ ID No: 224, SEQ ID No: 226, SEQ ID No: 230, SEQ ID No: 231, SEQ ID No: 233, SEQ ID No: 238, SEQ ID No: 239, SEQ ID No: 240, SEQ ID No: 242, SEQ ID No: 243, SEQ ID No: 245, SEQ ID No: 246, SEQ ID No: 248, SEQ ID No: 250, SEQ ID No: 251, SEQ ID No: 253, SEQ ID No: 255, SEQ ID No: 259, SEQ ID No: 260, SEQ ID No: 263, SEQ ID No: 265, SEQ ID No: 269, SEQ ID No: 271, SEQ ID No: 277, SEQ ID No: 279, SEQ ID No: 2 , SEQ ID No: 284, SEQ ID No: 286, SEQ ID No: 287, SEQ ID No: 289, SEQ ID No: 291, SEQ ID No: 293, SEQ ID No: 294, SEQ ID No: 296, SEQ ID No: 298, SEQ ID No: 299, SEQ ID No: 301, SEQ ID No: 302, SEQ ID No: 303, SEQ ID No: 305, SEQ ID No: 306, SEQ ID No: 308, SEQ ID No: 309, SEQ ID No: 311, SEQ ID No: 312, SEQ ID No: 314, SEQ ID No: 315, SEQ ID No: 317, SEQ ID No: 319, SEQ ID No: 320, SEQ ID No: 322, SEQ ID No: 323, SEQ ID No: 324, SEQ ID No: 326, SEQ ID No: 327, SEQ ID No: 329, SEQ ID No: 331, SEQ ID No: 332, SEQ ID No: 334, SEQ ID No: 335, SEQ ID No: 339, SEQ ID No: 340, SEQ ID No: 345, SEQ ID No: 347, SEQ ID No: 350, SEQ ID No: 352, SEQ ID No: 354, SEQ ID No: 356, SEQ ID No: 358, SEQ ID No: 359, SEQ ID No: 368, SEQ ID No: 369, SEQ ID No: 3 , SEQ ID No: 374, SEQ ID No: 375, SEQ ID No: 380, SEQ ID No: 382, SEQ ID No: 383, SEQ ID No: 385, SEQ ID No: 386, SEQ ID No: 388, SEQ ID No: 392, SEQ ID No: 394, SEQ ID No: 402, SEQ ID No: 401, SEQ ID No: 430, SEQ ID No: 414, SEQ ID No: 415, SEQ ID No: 417, SEQ ID No: 418, SEQ ID No: 430, SEQ ID No: 431, SEQ ID No: 435, SEQ ID No: 437, SEQ ID No: 439, SEQ ID No: 440, SEQ ID No: 443, SEQ ID No: 444, SEQ ID No: 45 , SEQ ID No: 4 , SEQ ID No: 447, SEQ ID No: 448, SEQ ID No: 449, SEQ ID No: 450, SEQ ID No: 451, SEQ ID No: 452, SEQ ID No: 453, SEQ ID No: 454, SEQ ID No: 455, SEQ ID No: 456, SEQ ID No: 457, SEQ ID No: 45, SEQ ID No: 459, SEQ ID No: 460, SEQ ID No: 461, SEQ ID No: 462, SEQ ID No: 463, SEQ ID No: 464, SEQ ID No: 465, SEQ ID No: 466, SEQ ID No: 467, SEQ ID No: 468 and their respective complements.

22. A library of polynucleotide sequences for distinguishing a person with cancer from a person without cancer comprising SEQ ID No: 1, SEQ ID No: 7, SEQ ID No: 8, SEQ ID No: 39, SEQ ID No: 40, SEQ ID No: 46, SEQ ID No: 54, SEQ ID No: 55, SEQ ID No: 76, SEQ ID No: 91, SEQ ID No: 115, SEQ ID No: 116, SEQ ID No: 126, SEQ ID No: 127, SEQ ID No: 138, SEQ ID No: 139, SEQ ID No: 141, SEQ ID No: 142, SEQ ID No: 147, SEQ ID No: 148, SEQ ID No: 156, SEQ ID No: 157, SEQ ID No: 162, SEQ ID No: 168, SEQ ID No: 178, SEQ ID No: 204, SEQ ID No: 205, SEQ ID No: 216, SEQ ID No: 230, SEQ ID No: 231, SEQ ID No: 248, SEQ ID No: 250, SEQ ID No: 251, SEQ ID No: 265, SEQ ID No: 271, SEQ ID No: 308, SEQ ID No: 309, SEQ ID No: 311, SEQ ID No: 312, SEQ ID No: 317, SEQ ID No: 324, SEQ ID No: 345, SEQ ID No: 350, SEQ ID No: 368, SEQ ID No: 369, SEQ ID No: 417, SEQ ID No: 418, SEQ ID No: 430, SEQ ID No: 431, SEQ ID No: 437, SEQ ID No: 440, SEQ ID No: 450, SEQ ID No: 452, SEQ ID No: 453, SEQ ID No: 454, SEQ ID No: 460andSEQ ID No: 468.

23. A library of polynucleotide sequences for detecting hormone-sensitive tumors comprising SEQ ID No: 22, SEQ ID No: 23, SEQ ID No: 59, SEQ ID No: 60, SEQ ID No: 76, SEQ ID No: 82, SEQ ID No: 97, SEQ ID No: 98, SEQ ID No: 135, SEQ ID No: 136, SEQ ID No: 156, SEQ ID No: 157, SEQ ID No: 255, SEQ ID No: 279, SEQ ID No: 280, SEQ ID No: 322, SEQ ID No: 323, SEQ ID No: 331, SEQ ID No: 332, SEQ ID No: 334, SEQ ID No: 335, SEQ ID No: 345, SEQ ID No: 352, SEQ ID No: 354, SEQ ID No: 385, SEQ ID No: 386, SEQ ID No: 394, SEQ ID No: 402, SEQ ID No: 414, SEQ ID No: 415, SEQ ID No: 443 and SEQ ID No: 457.

24. A library of polynucleotide sequences for distinguishing a tumor in which a lymph node has been invaded by a tumor cell from a tumor in which a lymph node has not been invaded by a tumor cell comprising SEQ ID No: 16, SEQ ID No: 22, SEQ ID No: 23, SEQ ID No: 39, SEQ ID No: 40, SEQ ID No: 57, SEQ ID No: 76, SEQ ID No: 82, SEQ ID No: 97, SEQ ID No: 98, SEQ ID No: 135, SEQ ID No: 136, SEQ ID No: 216, SEQ ID No: 238, SEQ ID No: 239, SEQ ID No: 250, SEQ ID No: 251, SEQ ID No: 322, SEQ ID No: 323, SEQ ID No: 326, SEQ ID No: 327, SEQ ID No: 329, SEQ ID No: 334, SEQ ID No: 335, SEQ ID No: 374, SEQ ID No: 375, SEQ ID No: 402, SEQ ID No: 430, SEQ ID No: 439, SEQ ID No: 444, SEQ ID No: 445 and SEQ ID No: 457.

25. A library of polynucleotide sequences for distinguishing anthracycline-sensitive tumors from anthracyline-insensitive tumors comprising SEQ ID No: 22, SEQ ID No: 23, SEQ ID No: 48, SEQ ID No: 49, SEQ ID No: 51, SEQ ID No: 52, SEQ ID No: 59, SEQ ID No: 60, SEQ ID No: 65, SEQ ID No: 66, SEQ ID No: 73, SEQ ID No: 74, SEQ ID No: 76, SEQ ID No: 82, SEQ ID No: 86, SEQ ID No: 135, SEQ ID No: 136, SEQ ID No: 156, SEQ ID No: 157, SEQ ID No: 178, SEQ ID No: 194, SEQ ID No: 226, SEQ ID No: 308, SEQ ID No: 309, SEQ ID No: 326, SEQ ID No: 327, SEQ ID No: 331, SEQ ID No: 332, SEQ ID No: 354, SEQ ID No: 385, SEQ ID No: 386, SEQ ID No: 392, SEQ ID No: 394, SEQ ID No: 433, SEQ ID No-. 434, SEQ ID No: 444 and SEQ ID No: 456.

26. A method of detecting differentially expressed genes correlated with a cancer comprising detecting at least one polynucleotide sequence or subsequence of a polynucleotide library according to claim 2 or detecting at least one product encoded by said polynucleotide library in a sample obtained from a patient.

27. A method according to claim 26 further comprising comparing an amount of said at least one polynucleotide sequence or subsequence or product encoded by said polynucleotide sequence with an amount of said polynucleotide sequence or subsequence or product encoded by said polynucleotide sequence or subsequence obtained from a control sample.

28. A method according to claim 26 comprising extracting mRNA from said polynucleotide sample.

29. A method according to claim 28 comprising reverse transcribing said mRNA to cDNA.

30. The method according to claim 26 comprising hybridizing said at least one polynucleotide sequence or subsequence with mRNA or cDNA from the polynucleotide sample.

31. The method of claim 26 comprising detecting, diagnosing, staging, monitoring, predicting, preventing or treating conditions associated with cancer.

32. The method according to claim 26 wherein the product encoded by any of the polynucleotide sequences or subsequences is involved in a receptor-ligand reaction on which detection is based.

33. A method for screening an anti-tumor agent comprising the method according to claim 26 wherein the polynucleotide sample has been treated with an anti-tumor agent to be screened.

34. A polynucleotide library according to claim 1 wherein said sequences or subsequences correspond substantially to any combination of at least one polynucleotide sequence selected among those included in each one of predefined polynucleotide sequence sets comprising:
SET 1: (SEQ ID No: 1; SEQ ID No: 2); SET 2: (SEQ ID No: 3; SEQ ID No: 4); SET 3: (SEQ ID No: 5; SEQ ID No: 6); SET 4: (SEQ ID No: 7;SEQ ID No: 8); SET 5: (SEQ ID No: 9; SEQ ID No: 10); SET 6: (SEQ ID No: 1: SEQ ID No: 12); SET 7: (SEQ ID No: 13; SEQ ID No: 14;SEQ ID No: 15); SET 8: (SEQ ID No: 16); SET 9: (SEQ ID No: 17; SEQ ID No: 18; SEQ ID No: 19); SET 10: (SEQ ID No: 20; SEQ ID No: 21); SET 11: (SEQ ID No: 22; SEQ ID No: 23; SEQ ID No: 24); SET 12: (SEQ ID No: 25; SEQ ID No: 26); SET 13: (SEQ ID No: 27; SEQ ID No: 28; SEQ ID No: 29); SET 14: (SEQ ID No: 30; SEQ ID No: 31); SET 15: (SEQ ID No: 32; SEQ ID No: 33; SEQ ID No: 34); SET 16: (SEQ ID No: 35); SET 17: (SEQ ID No: 36; SEQ ID No: 37; SEQ ID No: 38); SET 18: (SEQ ID No: 39; SEQ ID No: 40; SEQ ID No: 41); SET 19: (SEQ ID No: 42; SEQ ID No: 43); SET 20: (SEQ ID No: 44; SEQ ID No: 45); SET 21: (SEQ ID No: 46; SEQ ID No: 47); SET 22: (SEQ ID No: 48; SEQ ID No: 49; SEQ ID No: 50); SET 23: (SEQ ID No: 51; SEQ ID No: 52; SEQ ID No: 53); SET 24: (SEQ ID No: 54; SEQ ID No: 55; SEQ ID No: 56); SET 25: (SEQ ID No: 57; SEQ ID No: 58); SET 26: (SEQ ID No: 59; SEQ ID No: 60; SEQ ID No: 61); SET 27: (SEQ ID No: 62; SEQ ID No: 63; SEQ ID No: 64); SET 28 : (SEQ ID No: 65; SEQ ID No: 66; SEQ ID No: 67); SET 29 : (SEQ ID No: 68; SEQ ID No: 69; SEQ ID No: 70); SET 30: (SEQ ID No: 71; SEQ ID No: 72); SET 31: (SEQ ID No: 73; SEQ ID No: 74; SEQ ID No: 75); SET 32: (SEQ ID No: 76; SEQ ID No: 77; SEQ ID No: 78); SET 33: (SEQ ID No: 79; SEQ ID No: 80; SEQ ID No: 81); SET 34: (SEQ ID No: 82; SEQ ID No: 83); SET 35: (SEQ ID No: 84; SEQ ID No: 85); SET 36: (SEQ ID No: 86; SEQ ID No: 87); SET 37: (SEQ ID No: 88; SEQ ID No: 89; SEQ ID No: 90); SET 38: (SEQ ID No: 91; SEQ ID No: 92; SEQ ID No: 93); SET 39: (SEQ ID No: 94; SEQ ID No: 95; SEQ ID No: 96); SET 40: (SEQ ID No: 97; SEQ ID No: 98; SEQ ID No: 99) ; SET 41: (SEQ ID No: 100; SEQ ID No: 101; SEQ ID No: 78); SET 42: (SEQ ID No: 102; SEQ ID No: 103); SET 43: (SEQ ID No: 104; SEQ ID No: 105); SET 44: (SEQ ID No: 106; SEQ ID No: 107; SEQ ID No: 108); SET 45: (SEQ ID No: 109; SEQ ID No: 110); SET 46: (SEQ ID No: 111; SEQ ID No: 112; SEQ ID No: 113); SET 47: (SEQ ID No: 114); SET 48: (SEQ ID No: 115; SEQ ID No: 116; SEQ ID No: 117); SET 49: (SEQ ID No: 118; SEQ ID No: 119); SET 50: (SEQ ID No: 120; SEQ ID No: 121); SET 51: (SEQ ID No: 122; SEQ ID No: 78); SET 52: (SEQ ID No: 123; SEQ ID No: 124; SEQ ID No: 125); SET 53: (SEQ ID No: 126; SEQ ID No: 127; SEQ ID No: 128); SET 54: (SEQ ID No: 129; SEQ ID No: 130); SET 55: (SEQ ID No: 131; SEQ ID No: 132); SET 56: (SEQ ID No: 133; SEQ ID No: 134); SET 57: (SEQ ID No: 135; SEQ ID No: 136; SEQ ID No: 137); SET 58: (SEQ ID No: 138; SEQ ID No: 139; SEQ ID No: 140); SET 59: (SEQ ID No: 141; SEQ ID No: 142; SEQ ID No: 143); SET 60: (SEQ ID No: 144; SEQ ID No: 145; SEQ ID No: 146) SET 61: (SEQ ID No: 147; SEQ ID No: 148; SEQ ID No: 149); SET 62: (SEQ ID No: 150; SEQ ID No: 151; SEQ ID No: 152); SET 63: (SEQ ID No: 153; SEQ ID No: 154; SEQ ID No: 155); SET 64: (SEQ ID No: 156; SEQ ID No: 157; SEQ ID No: 158); SET 65: (SEQ ID No: 159; SEQ ID No: 160; SEQ ID No: 161); SET 66 : (SEQ ID No: 162; SEQ ID No: 163); SET 67: (SEQ ID No: 164; SEQ ID No: 165); SET 68: (SEQ ID No: 166; SEQ ID No: 167; SEQ ID No: 152) ;SET 69: (SEQ ID No: 168; SEQ ID No: 169; SEQ ID No: 170); SET 70: (SEQ ID No: 171; SEQ ID No: 172); SET 71: (SEQ ID No: 173; SEQ ID No: 174; SEQ ID No: 175); SET 72: (SEQ ID No: 176; SEQ ID No: 177); SET 73 : (SEQ ID No: 178; SEQ ID No: 179); SET 74: (SEQ ID No: 180; SEQ ID No: 181; SEQ ID No: 182); SET 75 : (SEQ ID No: 183; SEQ ID No: 184); SET 76: (SEQ ID No: 185); SET 77: (SEQ ID No: 186); SET 78: (SEQ ID No: 187; SEQ ID No: 188); SET 79: (SEQ ID No: 189; SEQ ID No: 190; SEQ ID No: 191); SET 80: (SEQ ID No: 192; SEQ ID No: 193) ;SET 81: (SEQ ID No: 194; SEQ ID No: 195); SET 82: (SEQ ID No: 196; SEQ ID No: 197; SEQ ID No: 198); SET 83: (SEQ ID No: 199; SEQ ID No: 200); SET 84: (SEQ ID No: 201; SEQ ID No: 202; SEQ ID No: 203); SET 85: (SEQ ID No: 204; SEQ ID No: 205); SET 86: (SEQ ID No: 206; SEQ ID No: 207); SET 87: (SEQ ID No: 208; SEQ ID No: 209); SET 88: (SEQ ID No: 210; SEQ ID No: 211); SET 89: (SEQ ID No: 212; SEQ ID No: 213); SET 90: (SEQ ID No: 214; SEQ ID No: 215); SET 91: (SEQ ID No: 216; SEQ ID No: 217); SET 92: (SEQ ID No: 218; SEQ ID No: 219; SEQ ID No: 220); SET 93 : (SEQ ID No: 221; SEQ ID No: 222); SET 94: (SEQ ID No: 223; SEQ ID No: 224; SEQ ID No: 225); SET 95: (SEQ ID No: 226; SEQ ID No: 227); SET 96: (SEQ ID No: 228; SEQ ID No: 229); SET 97: (SEQ ID No: 230; SEQ ID No: 231; SEQ ID No: 232); SET 98: (SEQ ID No: 233; SEQ ID No: 234); SET 99: (SEQ ID No: 235; SEQ ID No: 236; SEQ ID No: 237) ;SET 100 : (SEQ ID No: 238; SEQ ID No: 239); SET 101: (SEQ ID No: 240; SEQ ID No: 241); SET 102: (SEQ ID No: 242; SEQ ID No: 243; SEQ ID No: 244); SET 103: (SEQ ID No: 245; SEQ ID No: 246; SEQ ID No: 247); SET 104: (SEQ ID No: 248; SEQ ID No: 249); SET 105 :(SEQ ID No: 250; SEQ ID No: 251; SEQ ID No: 252); SET 106: (SEQ ID No: 253; SEQ ID No: 254); SET 107: (SEQ ID No: 255; SEQ ID No: 256); SET 108: (SEQ ID No: 257; SEQ ID No: 258); SET 109 (SEQ ID No: 259; SEQ ID No: 260; SEQ ID No: 261); SET 110: (SEQ ID No: 262; SEQ ID No: 200); SET 11: (SEQ ID No: 263; SEQ ID No: 264); SET 112: (SEQ ID No: 265; SEQ ID No: 266) SET 113 :(SEQ ID No: 267; SEQ ID No: 268); SET 114: (SEQ ID No: 269; SEQ ID No: 270); SET 115: (SEQ ID No: 271; SEQ ID No: 272); SET 116: (SEQ ID No: 273; SEQ ID No: 274); SET 117: (SEQ ID No: 275; SEQ ID No: 276); SET 118: (SEQ ID No: 277; SEQ ID No: 278); SET 119 :(SEQ ID No: 279; SEQ ID No: 280; SEQ ID No: 281); SET 120: (SEQ ID No: 282; SEQ ID No: 283; SEQ ID No: 276); SET 121: (SEQ ID No: 284; SEQ ID No: 285); SET 122: (SEQ ID No: 286; SEQ ID No: 287; SEQ ID No: 288); SET 123: (SEQ ID No: 289; SEQ ID No: 290); SET 124: (SEQ ID No: 291; SEQ ID No: 292); SET 125 : (SEQ ID No: 293; SEQ ID No: 294; SEQ ID No: 295); SET 126: (SEQ ID No: 296; SEQ ID No: 297); SET 127: (SEQ ID No: 298; SEQ ID No: 299; SEQ ID No: 300); SET 128: (SEQ ID No: 301; SEQ ID No: 302; SEQ ID No: 288); SET 129: (SEQ ID No: 303; SEQ ID No: 304); SET 130: (SEQ ID No: 305; SEQ ID No: 306; SEQ ID No: 307); SET 131: (SEQ ID No: 308; SEQ ID No: 309; SEQ ID No: 310); SET 132: (SEQ ID No: 311; SEQ ID No: 312; SEQ ID No: 313); SET 133: (SEQ ID No: 314; SEQ ID No: 315; SEQ ID No: 316); SET 134: (SEQ ID No: 317; SEQ ID No: 318); SET 135 : (SEQ ID No: 319; SEQ ID No: 320; SEQ ID No: 321); SET 136: (SEQ ID No: 322; SEQ ID No: 323); SET 137: (SEQ ID No: 324; SEQ ID No: 325) ; SET 138: (SEQ ID No: 326; SEQ ID No: 327; SEQ ID No: 328); SET 139: (SEQ ID No: 329; SEQ ID No: 330); SET 140: (SEQ ID No: 331;SEQ ID No: 332;SEQ ID No: 333); SET 141: (SEQ ID No: 334; SEQ ID No: 335; SEQ ID No: 336); SET 142: (SEQ ID No: 337; SEQ ID No: 338; SEQ ID No: 117); SET 143: (SEQ ID No: 339; SEQ ID No: 340;SEQ ID No: 341); SET 144: (SEQ ID No: 342; SEQ ID No: 343; SEQ ID No: 344); SET 145 : (SEQ ID No: 345; SEQ ID No: 346); SET 146: (SEQ ID No: 347; SEQ ID No: 348; SEQ ID No: 349); SET 147: (SEQ ID No: 350; SEQ ID No: 351); SET 148: (SEQ ID No: 352; SEQ ID No: 353); SET 149: (SEQ ID No: 354; SEQ ID No: 355); SET 150: (SEQ ID No: 356; SEQ ID No: 357); SET 151: (SEQ ID No: 358; SEQ ID No: 359; SEQ ID No: 360); SET 152: (SEQ ID No: 361; SEQ ID No: 31); SET 153: (SEQ ID No: 362; SEQ ID No: 363; SEQ ID No: 364); SET 154: (SEQ ID No: 365; SEQ ID No: 366; SEQ ID No: 367); SET 155: (SEQ ID No: 368; SEQ ID No: 369; SEQ ID No: 300); SET 156: (SEQ ID No: 370; SEQ ID No: 371); SET 157: (SEQ ID No: 372; SEQ ID No: 373; SEQ ID No: 108); SET 158: (SEQ ID No: 374; SEQ ID No: 375; SEQ ID No: 376); SET 159: (SEQ ID No: 377; SEQ ID No: 378; SEQ ID No: 379); SET 160: (SEQ ID No: 380; SEQ ID No: 381); SET 161: (SEQ ID No: 382; SEQ ID No: 383; SEQ ID No: 384); SET 162: (SEQ ID No: 385; SEQ ID No: 386; SEQ ID No: 387); SET 163: (SEQ ID No: 388; SEQ ID No: 389; SEQ ID No: 390); SET 164: (SEQ ID No: 391; SEQ ID No: 392; SEQ ID No: 393); SET 165: (SEQ ID No: 394; SEQ ID No: 395); SET 166: (SEQ ID No: 396; SEQ ID No: 397; SEQ ID No: 398); SET 167: (SEQ ID No: 399; SEQ ID No: 400; SEQ ID No: 117) ;SET 168: (SEQ ID No: 401); SET 169: (SEQ ID No: 402; SEQ ID No: 403); SET 170: (SEQ ID No: 404; SEQ ID No: 405; SEQ ID No: 318); SET 171: (SEQ ID No: 406; SEQ ID No: 407; SEQ ID No: 408); SET 172: (SEQ ID No: 409; SEQ ID No: 410; SEQ ID No: 411); SET 173: (SEQ ID No: 412; SEQ ID No: 413); SET 174: (SEQ ID No: 414; SEQ ID No: 415; SEQ ID No: 416); SET 175: (SEQ ID No: 417; SEQ ID No: 418; SEQ ID No: 419); SET 176: (SEQ ID No: 420; SEQ ID No: 421; SEQ ID No: 422); SET 177: (SEQ ID No: 423; SEQ ID No: 424; SEQ ID No: 425); SET 178: (SEQ ID No: 426; SEQ ID No: 427; SEQ ID No: 428); SET 179: (SEQ ID No: 429; SEQ ID No: 408); SET 180: (SEQ ID No: 430); SET 181: (SEQ ID No: 431); SET 182: (SEQ ID No: 432); SET 183: (SEQ ID No: 433; SEQ ID No: 434); SET 184: (SEQ ID No: 435; SEQ ID No: 436); SET 185: (SEQ ID No: 437); SET 186: (SEQ ID No: 438; SEQ ID No: 439); SET 187: (SEQ ID No: 440; SEQ ID No: 441); SET 188: (SEQ ID No: 442); SET 189: (SEQ ID No: 443); SET 190: (SEQ ID No: 444); SET 191: (SEQ ID No: 329; SEQ ID No: 330; SEQ ID No: 345); SET 192: (SEQ ID No: 446; SEQ ID No: 447); SET 193 : (SEQ ID No: 380; SEQ ID No: 381; SEQ ID No: 448); SET 194: (SEQ ID No: 449); SET 195: (SEQ ID No: 271; SEQ ID No: 272; SEQ ID No: 450); SET 196: (SEQ ID No: 84; SEQ ID No: 85; SEQ ID No: 451); SET 197: (SEQ ID No: 452); SET 198 : (SEQ ID No: 453); SET 199 :(SEQ ID No: 454); SET 200: (SEQ ID No: 183; SEQ ID NO: 184; SEQ ID No: 455); SET 201: (SEQ ID No: 456); SET 202: (SEQ ID No: 402; SEQ ID No: 403; SEQ ID No: 457); SET 203: (SEQ ID No: 458); SET 204: (SEQ ID No: 459); SET 205: (SEQ ID No: 460); SET 206: (SEQ ID No: 461); SET 207: (SEQ ID No: 462); SET 208: (SEQ ID No: 463); SET 209: (SEQ ID No: 464); SET 210: (SEQ ID No: 465); SET 211: (SEQ ID No: 466); SET 212: (SEQ ID No: 467); SET 213: (SEQ ID No: 468).

35. The library of claim 1 wherein the pool of polynucleotide sequences or subsequences correspond substantially to any combination of at least one polynucleotide sequence selected among those included in each one of predefined polynucleotide sequence sets comprising:
SET 1: (SEQ ID No: l; SEQ ID No: 2); SET 4: (SEQ ID No: 7 ; SEQ ID No: 8); SET 18: (SEQ ID No: 39 ; SEQ ID No: 40 ; SEQ ID No: 41); SET 21: (SEQ ID No: 46 ; SEQ ID No: 47); SET 24: (SEQ ID No: 54; SEQ ID No: 55; SEQ ID No: 56); SET 32: (SEQ ID No: 76; SEQ ID No: 77 ; SEQ ID No: 78); SET 38: (SEQ ID No: 91; SEQ ID No: 92 ; SEQ ID No: 93); SET 48: (SEQ ID No: 115; SEQ ID No: 116; SEQ ID No: 117); SET 53: (SEQ ID No: 126; SEQ ID No: 127; SEQ ID No: 128); SET 58: (SEQ ID No: 138 ; SEQ ID No: 139 ; SEQ ID No: 140); SET 59: (SEQ ID No: 141; SEQ ID No: 142 ; SEQ ID No: 143); SET 61: (SEQ ID No: 147 ; SEQ ID No: 148; SEQ ID No: 149); SET 64: (SEQ ID No: 156 ; SEQ ID No: 157 ; SEQ ID No: 158); SET 66: (SEQ ID No: 162 ; SEQ ID No: 163); SET 69: (SEQ ID No: 168 ; SEQ ID No: 169; SEQ ID No: 170); SET 73: (SEQ ID No: 178; SEQ ID No: 179); SET 85: (SEQ ID No: 204; SEQ ID No: 205); SET 88: (SEQ ID No: 210; SEQ ID No: 211); SET 91: (SEQ ID No: 216; SEQ ID No: 217); SET 97: (SEQ ID No: 230; SEQ ID No: 231; SEQ ID No: 232); SET 104: (SEQ ID No: 248; SEQ ID No: 249); SET 105: (SEQ ID No: 250; SEQ ID No: 251; SEQ ID No: 252); SET 112: (SEQ ID No: 265 ; SEQ ID No: 266); SET 113: (SEQ ID No: 267 ; SEQ ID No: 268); SET 115 ; (SEQ ID No: 271; SEQ ID No: 272); SET 131: (SEQ ID No: 308 ; SEQ ID No: 309; SEQ ID No: 310); SET 132: (SEQ ID No: 311; SEQ ID No: 312; SEQ ID No: 313); SET 134: (SEQ ID No: 317; SEQ ID No: 318); SET 137: (SEQ ID No: 324; SEQ ID No: 325); SET 145: (SEQ ID No: 345 ; SEQ ID No: 346); SET 147: (SEQ ID No: 350; SEQ ID No: 351); SET 155: (SEQ ID No: 368 ; SEQ ID No: 369 ; SEQ ID No: 300); SET 175: (SEQ ID No: 417; SEQ ID No: 418; SEQ ID No: 419); SET 180: (SEQ ID No: 430) SET 181: (SEQ ID No: 431); SET 182: (SEQ ID No: 432); SET 185: (SEQ ID No: 437); SET 187: (SEQ ID No: 440; SEQ ID No: 441),
wherein said sequences are useful in differentiating a normal cell from a cancer cell.

36. A polynucleotide library according to claim 1 wherein the pool of polynucleotide sequences or subsequences correspond substantially to any combination of at least one polynucleotide sequence selected among those included in each one of predefined polynucleotide sequence sets comprising:
SET 32: (SEQ ID No: 76; SEQ ID No: 77; SEQ ID No: 78); SET 73: (SEQ ID No: 178; SEQ ID No: 179); SET 131: (SEQ ID No: 308; SEQ ID No: 309 ; SEQ ID No: 310); SET 145: (SEQ ID No: 345; SEQ ID No: 346) and SET 181: (SEQ ID No: 431).
and of at least one polynucleotide sequence selected among those included in each one of predefined polynucleotide sequences sets comprising:
SET 38 : (SEQ ID No: 91; SEQ ID No: 92 ; SEQ ID No: 93); SET 58 : (SEQ ID No: 138 SEQ ID No: 139 ; SEQ ID No: 140); SET 61: (SEQ ID No: 147 ; SEQ ID No: 148; SEQ ID No: 149); SET 69: (SEQ ID No: 168 ; SEQ ID No: 169 ; SEQ ID No: 170) and SET 182: (SEQ ID No: 432).

37. The library of claim 1 wherein the pool of polynucleotide sequences or subsequences correspond substantially to any combination of at least one polynucleotide sequence selected among those included in each one of predefined polynucleotide sequence sets comprising:
SET 11: (SEQ ID No: 22 ; SEQ ID No: 23 ; SEQ ID No: 24); SET 26: (SEQ ID No: 59; SEQ ID No: 60;SEQ ID No: 61);SET 32:(SEQ ID No: 76;SEQ ID No: 77;SEQ ID No: 78);SET 34: (SEQ ID No: 82 ; SEQ ID No: 83); SET 40: (SEQ ID No: 97 ; SEQ ID No: 98 ; SEQ ID No: 99); SET 57: (SEQ ID No: 135; SEQ ID No: 136; SEQ ID No: 137); SET 64: (SEQ ID No: 156; SEQ ID No: 157; SEQ ID No: 158); SET 107: (SEQ ID No: 255; SEQ ID No: 256); SET 119: (SEQ ID No: 279; SEQ ID No: 280; SEQ ID No: 281); SET 136: (SEQ ID No: 322; SEQ ID No: 323); SET 140: (SEQ ID No: 331; SEQ ID No: 332; SEQ ID No: 333); SET 141: (SEQ ID No: 334; SEQ ID No: 335; SEQ ID No: 336); SET 145: (SEQ ID No: 345; SEQ ID No: 346); SET 148: (SEQ ID No: 352; SEQ ID No: 353); SET 149: (SEQ ID No: 354; SEQ ID No: 355); SET 162: (SEQ ID No: 385; SEQ ID No: 386; SEQ ID No: 387); SET 165: (SEQ ID No: 394; SEQ ID No: 395); SET 169 (SEQ ID No: 402; SEQ ID No: 403); SET 174: (SEQ ID No: 414; SEQ ID No: 415 ; SEQ ID No: 416) and SET 188: (SEQ ID No: 442),
wherein said sequences are useful in detecting a hormone-sensitive tumor cell.

38. The library of claim 37 wherein the pool of polynucleotide sequences or subsequences correspond substantially to any combination of at least one polynucleotide sequence selected among those included in each one of predefined polynucleotide sequence sets comprising:
SET 32: (SEQ ID No: 76; SEQ ID No: 77; SEQ ID No: 78); SET 136: (SEQ ID No: 322; SEQ ID No: 323); SET 145 : (SEQ ID No: 345 ; SEQ ID No: 346); SET 149: (SEQ ID No: 354; SEQ ID No: 355) and SET 169: (SEQ ID No: 402; SEQ ID No: 403)
and of at least one polynucleotide sequence selected among those included in each one of predefined polynucleotide sequence sets comprising:
SET 11: (SEQ ID No: 22 ; SEQ ID No: 23; SEQ ID No: 24); SET 40: (SEQ ID No: 97; SEQ ID No: 98; SEQ ID No: 99); SET 57: (SEQ ID No: 135 ; SEQ ID No: 136; SEQ ID No: 137); SET 119: (SEQ ID No: 279; SEQ ID No: 280; SEQ ID No: 281) and SET 174: (SEQ ID No: 414; SEQ ID No: 415 ; SEQ ID No: 416).

39. The library of claim 1 wherein the pool of polynucleotide sequences or subsequences correspond substantially to any combination of at least one polynucleotide sequence selected among those included in each one of predefined polynucleotide sequence sets comprising:
SET 8: (SEQ ID No: 16); SET ll: (SEQ ID No: 22; SEQ ID No: 23; SEQ ID No: 24); SET 18: (SEQ ID No: 39; SEQ ID No: 40; SEQ ID No: 41); SET 25: (SEQ ID No: 57; SEQ ID No: 58); SET 32: (SEQ ID No: 76; SEQ ID No: 77; SEQ ID No: 78); SET 34: (SEQ ID No: 82; SEQ ID No: 83); SET 40: (SEQ ID No: 97; SEQ ID No: 98; SEQ ID No: 99); SET 49: (SEQ ID No: 118; SEQ ID No: 119);SET 57:(SEQ ID No: 135;SEQ ID No: 136;SEQ ID No: 137) ;SET 91: (SEQ ID No: 216; SEQ ID No: 217); SET 100 : (SEQ ID No: 238 ; SEQ ID No: 239); SET 105 :(SEQ ID No: 250; SEQ ID No: 251: SEQ ID No: 252); SET 136: (SEQ ID No: 322 ; SEQ ID No: 323); SET 138 : (SEQ ID No: 326 ; SEQ ID No: 327; SEQ ID No: 328); SET 139 : (SEQ ID No: 329 ; SEQ ID No: 330); SET 141: (SEQ ID No: 334 ; SEQ ID No: 335 ; SEQ ID No: 336); SET 158 :(SEQ ID No: 374; SEQ ID No: 375 ; SEQ ID No: 376); SET 169: (SEQ ID No: 402; SEQ ID No: 403); SET 180: (SEQ ID No: 430) and SET 186: (SEQ ID No: 438 ; SEQ ID No: 439),
wherein said sequences are useful in differentiating a tumor in which a lymph node has been invaded by a tumor cell from a tumor in which a lymph node has not been invaded by a tumor cell.

40. The library of claim 39 wherein the pool of polynucleotide sequences or subsequences correspond substantially to any combination of at least one polynucleotide sequence selected among those included in each one of predefined polynucleotide sequence sets comprising:
SET 18 : (SEQ ID No: 39 ; SEQ ID No: 40 ; SEQ ID No: 41); SET 32: (SEQ ID No: 76 SEQ ID No: 77; SEQ ID No: 78); SET 57: (SEQ ID No: 135 ; SEQ ID No: 136; SEQ ID No: 137); SET 91: (SEQ ID No: 216; SEQ ID No: 217) and SET 105 (SEQ ID No: 250; SEQ ID No: 251; SEQ ID No: 252)
and of at least one polynucleotide sequence selected among those included in each one of predefined polynucleotide sequence sets comprising:
SET 11: (SEQ ID No: 22; SEQ ID No: 23; SEQ ID No: 24); SET 40: (SEQ ID No: 97; SEQ ID No: 98 SEQ ID No: 99);SET 49: (SEQ ID No: 118; SEQ ID No: 119);SET 100: (SEQ ID No: 238; SEQ ID No: 239) and SET 141: (SEQ ID No: 334; SEQ ID No: 335 ; SEQ ID No: 336).

41. The library of claims 1 or 2 wherein the pool of polynucleotide sequences or subsequences correspond substantially to any combination of at least one polynucleotide sequence selected among those included in each one of predefined polynucleotide sequence sets comprising:
SET 1: (SEQ ID No: 22; SEQ ID No: 23; SEQ ID No: 24); SET 22: (SEQ ID No: 48; SEQ ID No: 49 ; SEQ ID No: 50); SET 23 :(SEQ ID No: 51; SEQ ID No: 52 ; SEQ ID No: 53); SET 26: (SEQ ID No: 59; SEQ ID No: 60; SEQ ID No: 61); SET 28: (SEQ ID No: 65 ; SEQ ID No: 66 ; SEQ ID No: 67); SET 31: (SEQ ID No: 73; SEQ ID No: 74; SEQ ID No: 75); SET 32: (SEQ ID No: 76; SEQ ID No: 77 ; SEQ ID No: 78); SET 34: (SEQ ID No: 82 ; SEQ ID No: 83); SET 49: (SEQ ID No: 118 ; SEQ ID No: 119); SET 57: (SEQ ID No: 135 ; SEQ ID No: 136 ; SEQ ID No: 137); SET 64: (SEQ ID No: 156; SEQ ID No: 157 ; SEQ ID No: 158); SET 73: (SEQ ID No: 178; SEQ ID No: 179); SET 77: (SEQ ID No: 186); SET 81 : (SEQ ID No: 194; SEQ ID No: 195); SET 95: (SEQ ID No: 226 ; SEQ ID No: 227); SET 131: (SEQ ID No: 308 ; SEQ ID No: 309 ;SEQ ID No: 310); SET 138: (SEQ ID No: 326; SEQ ID No: 327 ; SEQ ID No: 328); SET 140: (SEQ ID No: 331; SEQ ID No: 332; SEQ ID No: 333); SET 149: (SEQ ID No: 354; SEQ ID No: 355); SET 162: (SEQ ID No: 385; SEQ ID No: 386 ; SEQ ID No: 387); SET 164: (SEQ ID No: 391; SEQ ID No: 392; SEQ ID No: 393); SET 165: (SEQ ID No: 394; SEQ ID No: 395) and SET 183: (SEQ ID No: 433; SEQ ID No: 434).
wherein said sequences are usefal in differentiating anthracycline-sensitive tumors from anthracycline-insensitive tumors.

42. A library according to claim 41 wherein the pool of polynucleotide sequences or subsequences correspond substantially to any combination of at least one polynucleotide sequence selected among those included in each one of predefined polynucleotide sequence sets consisting of
SET 32: (SEQ ID No: 76; SEQ ID No: 77, SEQ ID No: 78); SET 36: (SEQ ID No: 322; SEQ ID No: 323); SET 145: (SEQ ID No: 345; SEQ ID No: 346); SET 149: (SEQ ID No: 354; SEQ ID No: 355); SET 169: (SEQ ID No: 402; SEQ ID No: 403)
and of at least one polynucleotide sequence sets consisting of:
SET 11: (SEQ ID No: 22; SEQ ID No: 23; SEQ ID No: 24); SET 40: (SEQ ID No: 97; SEQ ID No: 98; SEQ ID No: 99); SET 57: (SEQ ID No: 135; SEQ ID No: 136; SEQ ID No: 137); SET 119: (SEQ ID No: 279; SEQ ID No: 280; SEQ ID No: 281); SET 174: (SEQ ID No: 414; SEQ ID No: 415; SEQ ID No: 416).

43. The library of claim 1 wherein the pool of polynucleotide sequences or subsequences correspond substantially to any combination of at least one polynucleotide sequence selected among those included in each one of predefined polynucleotide sequences sets comprising:
SET 14 (SEQ ID No: 30; SEQ ID No: 31); SET 23 (SEQ ID No: 51; SEQ ID No: 52; SEQ ID No: 53); SET 25 (SEQ ID No: 57; SEQ ID No: 58); SET 27 (SEQ ID No: 62; SEQ ID No: 63; SEQ ID No: 64); SET 28 (SEQ ID No: 65; SEQ ID No: 66; SEQ ID No: 67); SET 32 (SEQ ID No: 76; SEQ ID No: 77; SEQ ID No: 78); SET 39 (SEQ ID No: 94; SEQ ID No: 95; SEQ ID No: 96); SET 41 (SEQ ID No: 100; SEQ ID No: 101; SEQ ID No: 78); SET 44 (SEQ ID No: 106; SEQ ID No: 107; SEQ ID No: 108); SET 48 (SEQ ID No: 115; SEQ ID No: 116; SEQ ID No: 117); SET 51 (SEQ ID No: 122; SEQ ID No: 78); SET 64 (SEQ ID No: 156; SEQ ID No: 157; SEQ ID No: 158); SET 81 (SEQ ID No: 194; SEQ ID No: 195); SET 83 (SEQ ID No: 199; SEQ ID No: 200); SET 91 (SEQ ID No: 216; SEQ ID No: 217); SET 96 (SEQ ID No: 228; SEQ ID No: 229); SET 99 (SEQ ID No: 235; SEQ ID No: 236; SEQ ID No: 237); SET 108 (SEQ ID No: 257; SEQ ID No: 258); SET 110 (SEQ ID No: 262; SEQ ID No: 200); SET 116 (SEQ ID No: 273; SEQ ID No: 274); SET 117 (SEQ ID No: 275; SEQ ID No: 276); SET 118 (SEQ ID No: 277; SEQ ID No: 278); SET 120 (SEQ ID No: 282; SEQ ID No: 283; SEQ ID No: 276); SET 126 (SEQ ID No: 296; SEQ ID No: 297;); SET 142 (SEQ ID No: 337; SEQ ID No: 338; SEQ ID No: 117); SET 144 (SEQ ID No: 342; SEQ ID No: 343; SEQ ID No: 344); SET 149 (SEQ ID No: 354; SEQ ID No: 355); SET 152 (SEQ ID No: 361; SEQ ID No: 31); SET 153 (SEQ ID No: 362; SEQ ID No: 363; SEQ ID No: 364) SET 154 (SEQ ID No: 365; SEQ ID No: 366; SEQ ID No: 367); SET 157 (SEQ ID No: 372; SEQ ID No: 373; SEQ ID No: 108); SET 159 (SEQ ID No: 377; SEQ ID No: 378; SEQ ID No: 379); SET 162 (SEQ ID No: 385; SEQ ID No: 386; SEQ ID No: 387); SET 166 (SEQ ID No: 396; SEQ ID No: 397; SEQ ID No: 398); SET 167 (SEQ ID No: 399; SEQ ID No: 400; SEQ ID No: 117); SET 168 (SEQ ID No: 401); SET 171 (SEQ ID No: 406; SEQ ID No: 407; SEQ ID No: 408); SET 172 (SEQ ID No: 409; SEQ ID No: 410; SEQ ID No: 411); SET 173 (SEQ ID No: 412; SEQ ID No: 413); SET 176 (SEQ ID No: 420; SEQ ID No: 421; SEQ ID No: 422); SET 177 (SEQ ID No: 423; SEQ ID No: 424; SEQ ID No: 425); SET 178 (SEQ ID No: 426; SEQ ID No: 427; SEQ ID No: 428); SET 179 (SEQ ID No: 429; SEQ ID No: 408); SET 184 (SEQ ID No: 435; SEQ ID No: 436); SET 185 (SEQ ID No: 437)
wherein said sequences are useful in classifying good and poor prognosis primary breast tumors.

44. The library of claim 1 wherein the pool of polynucleotide sequences or subsequences correspond substantially to any combination of at least one polynucleotide sequence selected among those included in each one of predefined polynucleotide sequence sets comprising:
SET 23 (SEQ ID No: 51; SEQ ID No: 52; SEQ ID No: 53); SET 25 (SEQ ID No: 57 ; SEQ ID No: 58); SET 32 (SEQ ID No: 76 ; SEQ ID No: 77 ; SEQ ID No: 78); SET 41 (SEQ ID No: 100; SEQ ID No: 101; SEQ ID No: 78); SET 48 (SEQ ID No: 115; SEQ ID No: 116; SEQ ID No: 117); SET 51 (SEQ ID No: 122; SEQ ID No: 78); SET 64 (SEQ ID No: 156; SEQ ID No: 157; SEQ ID No: 158); SET 81 (SEQ ID No: 194; SEQ ID No: 195); SET 83 (SEQ ID No: 199; SEQ ID No: 200); SET 91 (SEQ ID No: 216; SEQ ID No: 217); SET 99 (SEQ ID No: 235; SEQ ID No: 236 SEQ ID No: 237); SET 110 (SEQ ID No: 262; SEQ ID No: 200); SET 116 (SEQ ID No: 273; SEQ ID No: 274); SET 142 (SEQ ID No: 337; SEQ ID No: 338; SEQ ID No: 117); SET 144 (SEQ ID No: 342; SEQ ID No: 343; SEQ ID No: 344); SET 149 (SEQ ID No: 354; SEQ ID No: 355); SET 162 (SEQ ID No: 385; SEQ ID No: 386; SEQ ID No: 387); SET 167 (SEQ ID No: 399; SEQ ID No: 400 ; SEQ ID No: 117); SET 171 (SEQ ID No: 406 ; SEQ ID No: 407; SEQ ID No: 408); SET 172 (SEQ ID No: 409 ; SEQ ID No: 410; SEQ ID No: 411); SET 173 (SEQ ID No: 412 ; SEQ ID No: 413); SET 176 (SEQ ID No: 420 ; SEQ ID No: 421; SEQ ID No: 422); SET 177 (SEQ ID No: 423 ; SEQ ID No: 424 ; SEQ ID No: 425); SET 178 (SEQ ID No: 426; SEQ ID No: 427; SEQ ID No: 428); SET 179 (SEQ ID No: 429 ; SEQ ID No: 408); SET 184 (SEQ ID No: 435 ; SEQ ID No: 436); SET 185 (SEQ ID No: 437),
and at least one polynucleotide sequence selected among those included in each one of predefined polynucleotide sequence sets comprising:
SET 14 (SEQ ID No: 30 ; SEQ ID No: 31); SET 27 (SEQ ID No: 62 ; SEQ ID No: 63; SEQ ID No: 64); SET 28 (SEQ ID No: 65 ; SEQ ID No: 66 ; SEQ ID No: 67); SET 39 (SEQ ID No: 94; SEQ ID No: 95;SEQ ID No: 96); SET44(SEQ ID No: 106;SEQ ID No: 107;SEQ ID No: 108); SET 96 (SEQ ID No: 228 ; SEQ ID No: 229); SET 108 (SEQ ID No: 257 ; SEQ ID No: 258) ; SET 117 (SEQ ID No: 275 ; SEQ ID No: 276); SET 118 (SEQ ID No: 277; SEQ ID No: 278); SET 120 (SEQ ID No: 282 ; SEQ ID No: 283 ; SEQ ID No: 276); SET 126 (SEQ ID No: 296 ; SEQ ID No: 297); SET 152 (SEQ ID No: 361; SEQ ID No: 31); SET 153 (SEQ ID No: 362 ; SEQ ID No: 363; SEQ ID No: 364); SET 154 (SEQ ID No: 365 ; SEQ ID No: 366; SEQ ID No: 367); SET 157 (SEQ ID No: 372 ; SEQ ID No: 373; SEQ ID No: 108); SET 159 (SEQ ID No: 377 ; SEQ ID No: 378; SEQ ID No: 379); SET 166 (SEQ ID No: 396; SEQ ID No: 397; SEQ ID No: 398); SET 168 (SEQ ID No: 401),
wherein the combination of overexpression of the genes identified by said first group of cluster sequences with the underexpression of the genes identified by said second group of cluster sequences are useful in classifying good and poor prognosis primary breast tumors.

45. The polynucleotide library of claim 1 wherein said tumor cells are breast tumor cells.

46. The polynucleotide library of claim 1 wherein said polynucleotides are immobilized on a solid support in order to form a polynucleotide array.

47. The polynucleotide library of claim 46 wherein the support is selected from the group consisting of a nylon membrane, nitrocellulose membrane, glass slide, glass beads, membranes on glass support or a silicon chip.

48. A polynucleotide array useful for prognosis or diagnosis of a tumor comprising an immobilized polynucleotide library according to claim 1 or 34.

49. A polynucleotide array useful to differentiate a normal cell from a cancer cell comprising any combination of immobilized polynucleotide sequence sets according to claim 35.

50. A polynucleotide array useful to differentiate a normal cell from a cancer cell comprising any combination of immobilized polynucletide sequence sets according to claim 36.

51. A polynucleotide array useful to detect a hormone-sensitive tumor cell comprising any combination of immobilized polynucleotide sequence sets according to claim 37.

52. A polynucleotide array useful to detect a hormone-sensitive tumor cell comprising any combination of immobilized polynucleotide sequence sets according to claim 38.

53. A polynucleotide array useful to differentiate a tumor in which a lymph node has been invaded by a tumor cell from a tumor in which a lymph node has not been invaded by a tumor cell comprising any combination of immobilized polynucleotide sequence sets according to claim 39.

54. A polynucleotide array useful to differentiate a tumor in which a lymph node has been invaded by a tumor cell from a tumor in which a lymph node has not been invaded by a tumor cell comprising any combination of immobilized polynucleotide sequences sets according to claim 40.

55. A polynucleotide array useful to differentiate anthracycline-sensitive tumors from anthracycline-insensitive tumors comprising any combination of immobilized polynucleotide sequence sets according to claim 41.

56. A polynucleotide array useful to classify good and poor prognosis primary breast tumors comprising any combination of immobilized polynucleotide sequence sets according to claim 42.

57. A polynucleotide array useful to classify good and poor prognosis primary breast tumors comprising any combination of immobilized polynucleotide sequence sets according to claim 43.

58. A polynucleotide array useful to classify good and poor prognosis primary breast tumors comprising any combination of polynucleotide sequence sets according to claim 44.

59. A method for detecting differentially expressed polynucleotide sequences which are correlated with a cancer, said method comprising:
obtaining a polynucleotide sample from a patient;
reacting said polynucleotide sample with a probe immobilized on a solid support wherein said probe comprises any of the polynucleotide sequences of the polynucleotide library of claim 1 or an expression product encoded by any of the polynucleotide sequences of the polynucleotide library of claim 1;
detecting a polynucleotide sample reaction product.

60. The method of claim 58 wherein said polynucleotide sample is labeled before said reacting step.

61. The method of claim 60 wherein the label of the polynucleotide sample is selected from the group consisting of radioactive, colorimetric, enzymatic, molecular amplification, bioluminescent or fluorescent labels.

62. The method of claim 59 furither comprising obtaining a control polynucleotide sample, reacting said control sample with said probe detecting a control sample reaction product, and comparing the amount of said polynucleotide sample reaction product to the amount of said control sample reaction product.

63. The method of claim 59 wherein RNA or mRNA is isolated from said polynucleotide sample.

64. The method of claim 63 wherein mRNA is isolated from said polynucleotide sample and cDNA is obtained by reverse transcription of said mRNA.

65. The method of claim 59 wherein said reacting step is performed by hybridizing the polynucleotide sample RNA with the probe.

66. The method of claim 59 wherein said method is used for detecting, diagnosing, staging, monitoring, predicting, preventing or treating conditions associated with cancer.

67. The method of claim 59 wherein the cancer is breast cancer.

68. The method of claim 59 wherein the product encoded by any of the polynucleotide sequences or polynucleotide sequence sets is involved in a receptor-ligand reaction on which detection is based.

69. A method for screening an anti-tumor agent comprising the method of claim 59 wherein said polynucleotide sample has been treated with an anti-tumor agent to be screened.
